(19) United States
(12) Patent Application Publication
(10) Pub. No.: US 2025/0145987 A1
(43) Pub. Date: May 8, 2025

(54) Antibodies that Bind CD3 Epsilon

(71) Applicant: Twist Bioscience Corporation, South San Francisco, CA (US)

(72) Inventors: Aaron Sato, Burlingame, CA (US); Pankaj Garg, Burlingame, CA (US); Qiang Liu, Palo Alto, CA (US); Tom Yuan, South San Francisco, CA (US)

(73) Assignee: Twist Bioscience Corporation, South San Francisco, CA (US)

(21) Appl. No.: 18/932,757

(22) Filed: Oct. 31, 2024

Related U.S. Application Data
(62) Division of application No. 17/030,232, filed on Sep. 23, 2020, now Pat. No. 12,173,282.
(60) Provisional application No. 62/945,761, filed on Dec. 9, 2019.
(60) Provisional application No. 62/935,603, filed on Nov. 14, 2019.
(60) Provisional application No. 62/904,620, filed on Sep. 23, 2019.

(51) Int. Cl. C12N 15/10; C07K 16/28

(52) U.S. Cl. CPC C12N 15/1068; C07K 16/2803; C07K 16/2869; C07K 16/2896; C07K 2317/565; C07K 2317/569; C07K 2317/75; C07K 2317/76; C07K 2317/92

(57) ABSTRACT

Provided herein are methods and compositions relating to variant nucleic acid libraries encoding for antibodies including single domain antibodies. Libraries generated using methods described herein have improved characteristics including improved binding affinity. Libraries described herein include variegated libraries comprising nucleic acids each encoding for a predetermined variant of at least one predetermined reference nucleic acid sequence. Further described herein are protein libraries generated when the nucleic acid libraries are translated. Further described herein are cell libraries expressing variegated nucleic acid libraries described herein.

### CROSS-REFERENCE

[0001] This application is a divisional of U.S. application Ser. No. 17/030,232, filed Sep. 23, 2020, which claims the benefit of U.S. Provisional Patent Application No. 62/904,620 filed on Sep. 23, 2019; U.S. Provisional Patent Application No. 62/935,603 filed on Nov. 14, 2019; and U.S. Provisional Patent Application No. 62/945,761 filed on Dec. 9, 2019, each of which is incorporated by reference in its entirety.

### SEQUENCE LISTING

[0002] The present application contains a Sequence Listing which has been submitted electronically in XML format. Said XML copy, created on Oct. 31, 2024, is named “01356-0006-01US.xml” and is 2,220,977 bytes in size. The information in the electronic format of the sequence listing is incorporated herein by reference in its entirety.

### BACKGROUND

[0003] Antibodies possess the capability to bind with high specificity and affinity to biological targets. However, the design of therapeutic antibodies is challenging due to balancing of immunological effects with efficacy. Single domain antibodies such as VHH antibodies have several beneficial characteristics. Thus, there is a need to develop compositions and methods for generation of antibodies such as VHH antibodies for use in therapeutics.

### INCORPORATION BY REFERENCE

[0004] All publications, patents, and patent applications mentioned in this specification are herein incorporated by reference to the same extent as if each individual publication, patent, or patent application was specifically and individually indicated to be incorporated by reference.

### BRIEF SUMMARY

[0005] Provided herein are antibodies or antibody fragments comprising a CDRH1 comprising an amino acid sequence at least about 90% identical to that set forth in SEQ ID NOs: 152 or 155, a CDRH2 comprising an amino acid sequence at least about 90% identical to that set forth in SEQ ID NOs: 153 or 156, and a CDRH3 comprising an amino acid sequence at least about 90% identical to that set forth in SEQ ID NOs: 154 or 157. Further provided herein are antibodies or antibody fragments, further comprising a CDRL1 comprising an amino acid sequence at least about 90% identical to that set forth in SEQ ID NOs: 158 or 161, a CDRL2 comprising an amino acid sequence at least about 90% identical to that set forth in SEQ ID NOs: 159 or 162, and a CDRL3 comprising an amino acid sequence at least about 90% identical to that set forth in SEQ ID NOs: 160 or 163.

[0006] Provided herein are methods of treating cancer comprising administering the antibody or antibody fragment described herein.

[0007] Provided herein are methods of treating a viral infection comprising administering the antibody or antibody fragment described herein.

[0008] Provided herein are nucleic acid libraries comprising: a plurality of sequences comprising nucleic acids that when translated encode for an antibody or antibody fragment, wherein each sequence of the plurality of sequences comprises a variant sequence encoding for a CDR1, CDR2, or CDR3 on a variable region of a heavy chain (VH) or a CDR1, CDR2, or CDR3 on a variable region of a light chain (VL); wherein the library comprises at least 30,000 variant sequences; and wherein the antibody or antibody fragments bind to its antigen with a K_{D} of less than 100 nM. Further provided herein are nucleic acid libraries, wherein the antibody is a single domain antibody. Further provided herein are nucleic acid libraries, wherein the single domain antibody is a VHH antibody. Further provided herein are nucleic acid libraries, wherein the antibody binds to TIGIT. Further provided herein are nucleic acid libraries, wherein the variable region of the heavy chain when translated comprises an amino acid sequence at least about 90% identical to that set forth in SEQ ID NOs: 84-100. Further provided herein are nucleic acid libraries, wherein the variable region of the light chain when translated comprises an amino acid sequence at least about 90% identical to that set forth in SEQ ID NOs: 101-117. Further provided herein are nucleic acid libraries, wherein the CDR1, CDR2, or CDR3 on the variable region of the heavy chain comprises an amino acid sequence at least about 90% identical to that set forth in any one of SEQ ID NOs: 67-83 or 118-128. Further provided herein are nucleic acid libraries, wherein the CDR1, CDR2, or CDR3 on the variable region of the light chain comprises an amino acid sequence at least about 90% identical to that set forth in any one of SEQ ID NOs: 129-137. Further provided herein are nucleic acid libraries, wherein the antibody binds to CD47. Further provided herein are nucleic acid libraries, wherein the antibody binds to CD3 epsilon. Further provided herein are nucleic acid libraries, wherein the variable region of the heavy chain when translated comprises an amino acid sequence at least about 90% identical to that set forth in SEQ ID NOs: 138-141. Further provided herein are nucleic acid libraries, wherein the variable region of the light chain when translated comprises an amino acid sequence at least about 90% identical to that set forth in SEQ ID NOs: 142-145. Further provided herein are nucleic acid libraries, wherein the nucleic acid library comprises at least 50,000 variant sequences. Further provided herein are nucleic acid libraries, wherein the nucleic acid library comprises at least 100,000 variant sequences. Further provided herein are nucleic acid libraries, wherein the nucleic acid library comprises at least 10⁵ non-identical nucleic acids. Further provided herein are nucleic acid libraries, wherein the nucleic acid library has a theoretical diversity of at least 10⁹ sequences.

[0009] Provided herein are nucleic acid libraries comprising: a plurality of sequences comprising nucleic acids that when translated encode for a single domain antibody, wherein each sequence of the plurality of sequences comprises a variant sequence encoding for CDR1, CDR2, or CDR3 on a variable region of a heavy chain (VH); wherein the library comprises at least 30,000 variant sequences; and wherein the antibody or antibody fragments bind to its antigen with a K_{D} of less than 100 nM. Further provided herein are nucleic acid libraries, wherein a length of the VH when translated is about 90 to about 100 amino acids. Further provided herein are nucleic acid libraries, wherein a length of the VH when translated is about 100 to about 400 amino acids. Further provided herein are nucleic acid libraries, wherein a length of the VH is about 270 to about 300 base pairs. Further provided herein are nucleic acid libraries, wherein a length of the VH is about 300 to about 1200 base pairs. Further provided herein are nucleic acid libraries, wherein the single domain antibody is a VHH antibody. Further provided herein are nucleic acid libraries, wherein the antibody binds to TIGIT. Further provided herein are nucleic acid libraries, wherein the CDR1, CDR2, or CDR3 on the variable region of the heavy chain comprises an amino acid sequence at least about 90% identical to that set forth in any one of SEQ ID NOs: 67-83 or 118-128. Further provided herein are nucleic acid libraries, wherein the variable region of the heavy chain when translated comprises an amino acid sequence at least about 90% identical to that set forth in any one of SEQ ID NOs: 84-100. Further provided herein are nucleic acid libraries, wherein the CDR3 on the variable region of the heavy chain comprises an amino acid sequence at least about 90% identical to that set forth in any one of SEQ ID NOs: 101-117. Further provided herein are nucleic acid libraries, wherein the antibody binds to CD47. Further provided herein are nucleic acid libraries, wherein the antibody binds to CD3 epsilon. Further provided herein are nucleic acid libraries, wherein the variable region of the heavy chain when translated comprises an amino acid sequence at least about 90% identical to that set forth in SEQ ID NOs: 138-141. Further provided herein are nucleic acid libraries, wherein the nucleic acid library comprises at least 50,000 variant sequences. Further provided herein are nucleic acid libraries, wherein the nucleic acid library comprises at least 100,000 variant sequences. Further provided herein are nucleic acid libraries, wherein the nucleic acid library comprises at least 10⁵ non-identical nucleic acids. Further provided herein are nucleic acid libraries, wherein the nucleic acid library has a theoretical diversity of at least 10⁹ sequences.

[0010] Provided herein are methods for generating a nucleic acid library encoding for a single domain antibody comprising: (a) providing predetermined sequences encoding for: i. a first plurality of polynucleotides, wherein each polynucleotide of the first plurality of polynucleotides encodes for at least 1000 variant sequences encoding for CDR1 on a heavy chain; ii. a second plurality of polynucleotides, wherein each polynucleotide of the second plurality of polynucleotides encodes for at least 1000 variant sequences encoding for CDR2 on a heavy chain; iii. a third plurality of polynucleotides, wherein each polynucleotide of the third plurality of polynucleotides encodes for at least 1000 variant sequences encoding for CDR3 on a heavy chain; and (b) mixing the first plurality of polynucleotides, the second plurality of polynucleotides, and the third plurality of polynucleotides to form the nucleic acid library of variant nucleic acids encoding for the single domain antibody, and wherein at least about 70% of the variant nucleic acids encode for a single domain antibody that binds to its antigen with a K_{D} of less than 100 nM. Further provided herein are methods for generating a nucleic acid library, wherein the single domain antibody comprises one heavy chain variable domain. Further provided herein are methods for generating a nucleic acid library, wherein the single domain antibody is a VHH antibody. Further provided herein are methods for generating a nucleic acid library, wherein the single domain antibody binds to TIGIT. Further provided herein are methods for generating a nucleic acid library, wherein the single domain antibody comprises an amino acid sequence at least about 90% identical to that set forth in any one of SEQ ID NOs: 84-100 or 138-141. Further provided herein are methods for generating a nucleic acid library, wherein the single domain antibody binds to CD47. Further provided herein are methods for generating a nucleic acid library, wherein the nucleic acid library comprises at least 50,000 variant sequences. Further provided herein are methods for generating a nucleic acid library, wherein the nucleic acid library comprises at least 100,000 variant sequences. Further provided herein are methods for generating a nucleic acid library, wherein the nucleic acid library comprises at least 10⁵ non-identical nucleic acids. Further provided herein are methods for generating a nucleic acid library, wherein the nucleic acid library comprises at least one sequence encoding for the single domain antibody that binds to an antigen with a K_{D} of less than 75 nM. Further provided herein are methods for generating a nucleic acid library, wherein the nucleic acid library comprises at least one sequence encoding for the single domain antibody that binds to an antigen with a K_{D} of less than 50 nM. Further provided herein are methods for generating a nucleic acid library, wherein the nucleic acid library comprises at least one sequence encoding for the single domain antibody that binds to an antigen with a K_{D} of less than 25 nM. Further provided herein are methods for generating a nucleic acid library, wherein the nucleic acid library comprises at least one sequence encoding for the single domain antibody that binds to an antigen with a K_{D} of less than 10 nM. Further provided herein are methods for generating a nucleic acid library, wherein the nucleic acid library has a theoretical diversity of at least 10⁹ sequences.

### BRIEF DESCRIPTION OF THE DRAWINGS

[0011] FIG. 1 presents a diagram of steps demonstrating an exemplary process workflow for gene synthesis as disclosed herein.

[0012] FIG. 2 illustrates an example of a computer system.

[0013] FIG. 3 is a block diagram illustrating an architecture of a computer system.

[0014] FIG. 4 is a diagram demonstrating a network configured to incorporate a plurality of computer systems, a plurality of cell phones and personal data assistants, and Network Attached Storage (NAS).

[0015] FIG. 5 is a block diagram of a multiprocessor computer system using a shared virtual address memory space.

[0016] FIGS. 6-7 depict a graph of TIGIT affinity distribution for the VHH libraries, depicting either the affinity threshold from 20 to 4000 (FIG. 6) or the affinity threshold from 20 to 1000 (FIG. 7). Out of 140 VHH binders, 51 variants were <100 nM and 90 variants were <200 nM.

[0017] FIG. 8 depicts graphs of CDR3 counts per length for ‘VHH library,’ ‘VHH shuffle’ library, and ‘VHH hShuffle library.’

[0018] FIG. 9 depicts a graph of a TIGIT: CD155 blockade assay for TIGIT VHH Fc binders. Concentration of the TIGIT VHH Fc binders in nanomolar (nM) is on the x-axis and relative HRP signal is on the y-axis.

[0019] FIG. 10 depicts a graph of CD47 affinity distribution of the CD47 VHH Fc binders. Affinity threshold (monovalent KD) is on the x-axis and count is on the y-axis for ‘VHH ratio’ library (horizontal bars), ‘VHH shuffle’ library (black bars), and ‘VHH hShuffle’ library (dotted bars).

[0020] FIG. 11 depicts a graph of CD47-SIRPalpha inhibition assay for CD47 VHH Fc binders. Concentration of the CD47 VHH Fc binders in nanomolar (nM) is on the x-axis and relative HRP signal is on the y-axis.

[0021] FIGS. 12A-12B depict graphs of FACS analysis (FIG. 12A) and graphs of a dose curve and specificity (FIG. 12B) of GLP1R-43-77.

[0022] FIGS. 13A-13B depict graphs of FACS analysis (FIG. 13A) and graphs of a dose curve and cAMP activity (FIG. 13B) of CRTH2-41-51.

[0023] FIGS. 14A-14B depict graphs of a dose curve (FIG. 14A) and FACS analysis (FIG. 14B) of CRTH2-44-59.

[0024] FIGS. 15A-15E depict FACS analysis plots of cell binding as measured by mean fluorescence intensity (MFI) vs. 8-point titrations with CRTH2R IgG using CRTH2-74, CRTH2-24, CRTH2-28, CRTH2-39, CRTH2-19, CRTH2-9, CRTH2-8, CRTH2-27, CRTH2-45, CRTH2-35, CRTH2-50, CRTH2-66, CRTH2-57, CRTH2-32, CRTH2-15, CRTH2-25, CRTH2-42, CRTH2-55, CRTH2-60, and CRTH2-70.

[0025] FIG. 16A depicts an example gated dot plot showing CRTH2-27 binding at 100 nM.

[0026] FIG. 16B depicts an example APC histogram showing CRTH2-27 binding at 100 nM.

[0027] FIG. 17A depicts binding analysis as in previous figures using comparator antibody gPCR-51.

[0028] FIG. 17B depicts binding analysis as in previous figures using comparator antibody gPCR-52.

[0029] FIGS. 18A-18B depict IgG binding curves with CRTH2-9, CRTH2-27, CRTH2-50, CRTH2-32, and CRTH2-42, which have functional effects in cAMP assays.

[0030] FIG. 19A depicts results of CRTH2R cAMP assays across all antibodies tested at 300, 100, and 33 nM.

[0031] FIG. 19B depicts results of CRTH2R cAMP assays across all antibodies tested at 33 nM.

[0032] FIG. 20 indicates the negative allosteric effect seen in five of the CRTH2R IgGs (CRTH2-9, CRTH2-27, CRTH2-50, CRTH2-32, and CRTH2-42).

[0033] FIGS. 21A-21C depict control experiments of allosteric modulators, showing comparator antibody 52 is a positive allosteric modulator.

[0034] FIGS. 22A-22D depict activity of CRTH2R in β-arrestin recruitment assays of CRTH2R IgGs.

[0035] FIG. 23 depicts a schema of libraries generated herein. FIG. 23 discloses SEQ ID NOs: 168-170, respectively, in order of appearance.

[0036] FIG. 24 depicts a schema of design of phage-displayed hyperimmune libraries generated herein.

[0037] FIGS. 25A-25B depict heavy chain CDR length distribution of the hyperimmune libraries as assessed by next generation sequencing. FIG. 25A depicts a graph of CDR3 counts per length. FIG. 25B depicts graphs of CDRH1, CDRH2, and CDRH3 lengths.

[0038] FIG. 26 depicts a schema of the workflow of selection of soluble protein targets.

[0039] FIGS. 27A-27D depict graphs of data from hTIGIT ELISA after Round 3 and Round 4 of panning.

[0040] FIGS. 27E-27F depict schemas of CDRH3 length, yield, and affinity (K_{D}) for the hTIGIT immunoglobulins.

[0041] FIGS. 28A-28D depict graphs of data from human CD3 epsilon (hCD3) and cyno CD3 epsilon (cCD3) ELISA after Round 4 and Round 5 of panning.

[0042] FIGS. 28E-28L depict graphs of cross-reactive human CD3 epsilon (hCD3) and cyno CD3 epsilon (cCD3) immunoglobulins.

[0043] FIGS. 29A-29G depict graphs of titration of human CD3 on CD8+, CD3+, and CD3-T cells.

[0044] FIGS. 30A-30F depict graphs of binding affinity for the CRTH2R immunoglobulins CRTH2-48-03 (FIG. 30A), CRTH2-48-21 (FIG. 30B), and CRTH2-48-27 (FIG. 30C) and cAMP assays for CRTH2-48-03 (FIG. 30D), CRTH2-48-21 (FIG. 30E), and CRTH2-48-27 (FIG. 30F).

[0045] FIGS. 31A-31B depict graphs of a dose curve (FIG. 31A) and FACS analysis (FIG. 31B) of A2AR-90-007.

### DETAILED DESCRIPTION

[0046] The present disclosure employs, unless otherwise indicated, conventional molecular biology techniques, which are within the skill of the art. Unless defined otherwise, all technical and scientific terms used herein have the same meaning as is commonly understood by one of ordinary skill in the art.

### Definitions

[0047] Throughout this disclosure, various embodiments are presented in a range format. It should be understood that the description in range format is merely for convenience and brevity and should not be construed as an inflexible limitation on the scope of any embodiments. Accordingly, the description of a range should be considered to have specifically disclosed all the possible subranges as well as individual numerical values within that range to the tenth of the unit of the lower limit unless the context clearly dictates otherwise. For example, description of a range such as from 1 to 6 should be considered to have specifically disclosed subranges such as from 1 to 3, from 1 to 4, from 1 to 5, from 2 to 4, from 2 to 6, from 3 to 6 etc., as well as individual values within that range, for example, 1.1, 2, 2.3, 5, and 5.9. This applies regardless of the breadth of the range. The upper and lower limits of these intervening ranges may independently be included in the smaller ranges, and are also encompassed within the disclosure, subject to any specifically excluded limit in the stated range. Where the stated range includes one or both of the limits, ranges excluding either or both of those included limits are also included in the disclosure, unless the context clearly dictates otherwise.

[0048] The terminology used herein is for the purpose of describing particular embodiments only and is not intended to be limiting of any embodiment. As used herein, the singular forms “a,” “an” and “the” are intended to include the plural forms as well, unless the context clearly indicates otherwise. It will be further understood that the terms “comprises” and/or “comprising,” when used in this specification, specify the presence of stated features, integers, steps, operations, elements, and/or components, but do not preclude the presence or addition of one or more other features, integers, steps, operations, elements, components, and/or groups thereof. As used herein, the term “and/or” includes any and all combinations of one or more of the associated listed items.

[0049] Unless specifically stated or obvious from context, as used herein, the term “about” in reference to a number or range of numbers is understood to mean the stated number and numbers +/−10% thereof, or 10% below the lower listed limit and 10% above the higher listed limit for the values listed for a range.

[0050] Unless specifically stated, as used herein, the term “nucleic acid” encompasses double-or triple-stranded nucleic acids, as well as single-stranded molecules. In double-or triple-stranded nucleic acids, the nucleic acid strands need not be coextensive (i.e., a double-stranded nucleic acid need not be double-stranded along the entire length of both strands). Nucleic acid sequences, when provided, are listed in the 5′ to 3′ direction, unless stated otherwise. Methods described herein provide for the generation of isolated nucleic acids. Methods described herein additionally provide for the generation of isolated and purified nucleic acids. A “nucleic acid” as referred to herein can comprise at least 5, 10, 20, 30, 40, 50, 60, 70, 80, 90, 100, 125, 150, 175, 200, 225, 250, 275, 300, 325, 350, 375, 400, 425, 450, 475, 500, 600, 700, 800, 900, 1000, 1100, 1200, 1300, 1400, 1500, 1600, 1700, 1800, 1900, 2000, or more bases in length. Moreover, provided herein are methods for the synthesis of any number of polypeptide-segments encoding nucleotide sequences, including sequences encoding non-ribosomal peptides (NRPs), sequences encoding non-ribosomal peptide-synthetase (NRPS) modules and synthetic variants, polypeptide segments of other modular proteins, such as antibodies, polypeptide segments from other protein families, including non-coding DNA or RNA, such as regulatory sequences e.g. promoters, transcription factors, enhancers, siRNA, shRNA, RNAi, miRNA, small nucleolar RNA derived from microRNA, or any functional or structural DNA or RNA unit of interest. The following are non-limiting examples of polynucleotides: coding or non-coding regions of a gene or gene fragment, intergenic DNA, loci (locus) defined from linkage analysis, exons, introns, messenger RNA (mRNA), transfer RNA, ribosomal RNA, short interfering RNA (siRNA), short-hairpin RNA (shRNA), micro-RNA (miRNA), small nucleolar RNA, ribozymes, complementary DNA (cDNA), which is a DNA representation of mRNA, usually obtained by reverse transcription of messenger RNA (mRNA) or by amplification; DNA molecules produced synthetically or by amplification, genomic DNA, recombinant polynucleotides, branched polynucleotides, plasmids, vectors, isolated DNA of any sequence, isolated RNA of any sequence, nucleic acid probes, and primers. cDNA encoding for a gene or gene fragment referred herein may comprise at least one region encoding for exon sequences without an intervening intron sequence in the genomic equivalent sequence.

### Antibody Libraries

[0051] Provided herein are methods, compositions, and systems for generation of antibodies. In some instances, the antibodies are single domain antibodies. Methods, compositions, and systems described herein for the optimization of antibodies comprise a ratio-variant approach that mirror the natural diversity of antibody sequences. In some instances, libraries of optimized antibodies comprise variant antibody sequences. In some instances, the variant antibody sequences are designed comprising variant CDR regions. In some instances, the variant antibody sequences comprising variant CDR regions are generated by shuffling the natural CDR sequences in a llama, humanized, or chimeric framework. In some instances, such libraries are synthesized, cloned into expression vectors, and translation products (antibodies) evaluated for activity. In some instances, fragments of sequences are synthesized and subsequently assembled. In some instances, expression vectors are used to display and enrich desired antibodies, such as phage display. In some instances, the phage vector is a Fab phagemid vector. Selection pressures used during enrichment in some instances includes binding affinity, toxicity, immunological tolerance, stability, or other factor. Such expression vectors allow antibodies with specific properties to be selected (“panning”), and subsequent propagation or amplification of such sequences enriches the library with these sequences. Panning rounds can be repeated any number of times, such as 1, 2, 3, 4, 5, 6, 7, or more than 7 rounds. In some instances, each round of panning involves a number of washes. In some instances, each round of panning involves at least or about 1, 2, 3, 4, 5, 6, 7, 8, 9, 10, 11, 12, 13, 14, 15, 16, or more than 16 washes.

[0052] Described herein are methods and systems of in-silico library design. Libraries as described herein, in some instances, are designed based on a database comprising a variety of antibody sequences. In some instances, the database comprises a plurality of variant antibody sequences against various targets. In some instances, the database comprises at least 100, 500, 1000, 1500, 2000, 2500, 3000, 3500, 4000, 4500, 5000, or more than 5000 antibody sequences. An exemplary database is an iCAN database. In some instances, the database comprises naïve and memory B-cell receptor sequences. In some instances, the naïve and memory B-cell receptor sequences are human, mouse, or primate sequences. In some instances, the naïve and memory B-cell receptor sequences are human sequences. In some instances, the database is analyzed for position specific variation. In some instances, antibodies described herein comprise position specific variations in CDR regions. In some instances, the CDR regions comprise multiple sites for variation.

[0053] Described herein are libraries comprising variation in a CDR region. In some instances, the CDR is CDR1, CDR2, or CDR3 of a variable heavy chain. In some instances, the CDR is CDR1, CDR2, or CDR3 of a variable light chain. In some instances, the libraries comprise multiple variants encoding for CDR1, CDR2, or CDR3. In some instances, the libraries as described herein encode for at least 50, 100, 200, 300, 400, 500, 1000, 1200, 1500, 1700, 2000, 2500, 3000, 3500, 4000, 4500, 5000, or more than 5000 CDR1 sequences. In some instances, the libraries as described herein encode for at least 50, 100, 200, 300, 400, 500, 1000, 1200, 1500, 1700, 2000, 2500, 3000, 3500, 4000, 4500, 5000, or more than 5000 CDR2 sequences. In some instances, the libraries as described herein encode for at least 50, 100, 200, 300, 400, 500, 1000, 1200, 1500, 1700, 2000, 2500, 3000, 3500, 4000, 4500, 5000, or more than 5000 CDR3 sequences. In-silico antibodies libraries are in some instances synthesized, assembled, and enriched for desired sequences.

[0054] Following synthesis of CDR1 variants, CDR2 variants, and CDR3 variants, in some instances, the CDR1 variants, the CDR2 variants, and the CDR3 variants are shuffled to generate a diverse library. In some instances, the diversity of the libraries generated by methods described herein have a theoretical diversity of at least or about 10⁷, 10⁸, 10⁹, 10¹⁰, 10¹¹, 10¹², 10¹³, 10¹⁴, 10¹⁵, 10¹⁶, 10¹⁷, 10^{18,} or more than 10¹⁸ sequences. In some instances, the library has a final library diversity of at least or about 10⁷, 10⁸, 10⁹, 10¹⁰, 10¹¹, 10¹², 10¹³, 10¹⁴, 10¹⁵, 10¹⁶, 10¹⁷, 10¹⁸, or more than 10¹⁸ sequences.

[0055] The germline sequences corresponding to a variant sequence may also be modified to generate sequences in a library. For example, sequences generated by methods described herein comprise at least 1, 2, 3, 4, 5, 6, 7, 8, 9, 10, 11, 12, 13, 14, 15, 16, or more than 16 mutations from the germline sequence. In some instances, sequences generated comprise no more than 1, 2, 3, 4, 5, 6, 7, 8, 9, 10, 11, 12, 13, 14, 15, 16, or no more than 18 mutations from the germline sequence. In some instances, sequences generated comprise about 1, 2, 3, 4, 5, 6, 7, 8, 9, 10, 11, 12, 13, 14, 15, 16, or about 18 mutations relative to the germline sequence.

### Antibody Libraries

[0056] Provided herein are libraries generated from methods described herein. Antibodies described herein result in improved functional activity, structural stability, expression, specificity, or a combination thereof. In some instances, the antibody is a single domain antibody. In some instances, the single domain antibody comprises one heavy chain variable domain. In some instances, the single domain antibody is a VHH antibody.

[0057] As used herein, the term antibody will be understood to include proteins having the characteristic two-armed, Y-shape of a typical antibody molecule as well as one or more fragments of an antibody that retain the ability to specifically bind to an antigen. Exemplary antibodies include, but are not limited to, a monoclonal antibody, a polyclonal antibody, a bi-specific antibody, a multispecific antibody, a grafted antibody, a human antibody, a humanized antibody, a synthetic antibody, a chimeric antibody, a camelized antibody, a single-chain Fvs (scFv) (including fragments in which the VL and VH are joined using recombinant methods by a synthetic or natural linker that enables them to be made as a single protein chain in which the VL and VH regions pair to form monovalent molecules, including single chain Fab and scFab), a single chain antibody, a Fab fragment (including monovalent fragments comprising the VL, VH, CL, and CH1 domains), a F(ab′)2 fragment (including bivalent fragments comprising two Fab fragments linked by a disulfide bridge at the hinge region), a Fd fragment (including fragments comprising the VH and CH1 fragment), a Fv fragment (including fragments comprising the VL and VH domains of a single arm of an antibody), a single-domain antibody (dAb or sdAb) (including fragments comprising a VH domain), an isolated complementarity determining region (CDR), a diabody (including fragments comprising bivalent dimers such as two VL and VH domains bound to each other and recognizing two different antigens), a fragment comprised of only a single monomeric variable domain, disulfide-linked Fvs (sdFv), an intrabody, an anti-idiotypic (anti-Id) antibody, or ab antigen-binding fragments thereof. In some instances, the libraries disclosed herein comprise nucleic acids encoding for an antibody, wherein the antibody is a Fv antibody, including Fv antibodies comprised of the minimum antibody fragment which contains a complete antigen-recognition and antigen-binding site. In some embodiments, the Fv antibody consists of a dimer of one heavy chain and one light chain variable domain in tight, non-covalent association, and the three hypervariable regions of each variable domain interact to define an antigen-binding site on the surface of the VH-VL dimer. In some embodiments, the six hypervariable regions confer antigen-binding specificity to the antibody. In some embodiments, a single variable domain (or half of an Fv comprising only three hypervariable regions specific for an antigen, including single domain antibodies isolated from camelid animals comprising one heavy chain variable domain such as VHH antibodies or nanobodies) has the ability to recognize and bind antigen. In some instances, the libraries disclosed herein comprise nucleic acids encoding for an antibody, wherein the antibody is a single-chain Fv or scFv, including antibody fragments comprising a VH, a VL, or both a VH and VL domain, wherein both domains are present in a single polypeptide chain. In some embodiments, the Fv polypeptide further comprises a polypeptide linker between the VH and VL domains allowing the scFv to form the desired structure for antigen binding. In some instances, a scFv is linked to the Fc fragment or a VHH is linked to the Fc fragment (including minibodies). In some instances, the antibody comprises immunoglobulin molecules and immunologically active fragments of immunoglobulin molecules, e.g., molecules that contain an antigen binding site. Immunoglobulin molecules are of any type (e.g., IgG, IgE, IgM, IgD, IgA and IgY), class (e.g., IgG 1, IgG 2, IgG 3, IgG 4, IgA 1 and IgA 2) or subclass.

[0058] In some embodiments, libraries comprise immunoglobulins that are adapted to the species of an intended therapeutic target. Generally, these methods include “mammalization” and comprises methods for transferring donor antigen-binding information to a less immunogenic mammal antibody acceptor to generate useful therapeutic treatments. In some instances, the mammal is mouse, rat, equine, sheep, cow, primate (e.g., chimpanzee, baboon, gorilla, orangutan, monkey), dog, cat, pig, donkey, rabbit, and human. In some instances, provided herein are libraries and methods for felinization and caninization of antibodies.

[0059] “Humanized” forms of non-human antibodies can be chimeric antibodies that contain minimal sequence derived from the non-human antibody. A humanized antibody is generally a human antibody (recipient antibody) in which residues from one or more CDRs are replaced by residues from one or more CDRs of a non-human antibody (donor antibody). The donor antibody can be any suitable non-human antibody, such as a mouse, rat, rabbit, chicken, or non-human primate antibody having a desired specificity, affinity, or biological effect. In some instances, selected framework region residues of the recipient antibody are replaced by the corresponding framework region residues from the donor antibody. Humanized antibodies may also comprise residues that are not found in either the recipient antibody or the donor antibody. In some instances, these modifications are made to further refine antibody performance.

[0060] “Caninization” can comprise a method for transferring non-canine antigen-binding information from a donor antibody to a less immunogenic canine antibody acceptor to generate treatments useful as therapeutics in dogs. In some instances, caninized forms of non-canine antibodies provided herein are chimeric antibodies that contain minimal sequence derived from non-canine antibodies. In some instances, caninized antibodies are canine antibody sequences (“acceptor” or “recipient” antibody) in which hypervariable region residues of the recipient are replaced by hypervariable region residues from a non-canine species (“donor” antibody) such as mouse, rat, rabbit, cat, dogs, goat, chicken, bovine, horse, llama, camel, dromedaries, sharks, non-human primates, human, humanized, recombinant sequence, or an engineered sequence having the desired properties. In some instances, framework region (FR) residues of the canine antibody are replaced by corresponding non-canine FR residues. In some instances, caninized antibodies include residues that are not found in the recipient antibody or in the donor antibody. In some instances, these modifications are made to further refine antibody performance. The caninized antibody may also comprise at least a portion of an immunoglobulin constant region (Fc) of a canine antibody.

[0061] “Felinization” can comprise a method for transferring non-feline antigen-binding information from a donor antibody to a less immunogenic feline antibody acceptor to generate treatments useful as therapeutics in cats. In some instances, felinized forms of non-feline antibodies provided herein are chimeric antibodies that contain minimal sequence derived from non-feline antibodies. In some instances, felinized antibodies are feline antibody sequences (“acceptor” or “recipient” antibody) in which hypervariable region residues of the recipient are replaced by hypervariable region residues from a non-feline species (“donor” antibody) such as mouse, rat, rabbit, cat, dogs, goat, chicken, bovine, horse, llama, camel, dromedaries, sharks, non-human primates, human, humanized, recombinant sequence, or an engineered sequence having the desired properties. In some instances, framework region (FR) residues of the feline antibody are replaced by corresponding non-feline FR residues. In some instances, felinized antibodies include residues that are not found in the recipient antibody or in the donor antibody. In some instances, these modifications are made to further refine antibody performance. The felinized antibody may also comprise at least a portion of an immunoglobulin constant region (Fc) of a felinize antibody.

[0062] Methods as described herein may be used for generation of libraries encoding a non-immunoglobulin. In some instances, the libraries comprise antibody mimetics. Exemplary antibody mimetics include, but are not limited to, anticalins, affilins, affibody molecules, affimers, affitins, alphabodies, avimers, atrimers, DARPins, fynomers, Kunitz domain-based proteins, monobodies, anticalins, knottins, armadillo repeat protein-based proteins, and bicyclic peptides.

[0063] Libraries described herein comprising nucleic acids encoding for an antibody comprise variations in at least one region of the antibody. Exemplary regions of the antibody for variation include, but are not limited to, a complementarity-determining region (CDR), a variable domain, or a constant domain. In some instances, the CDR is CDR1, CDR2, or CDR3. In some instances, the CDR is a heavy domain including, but not limited to, CDRH1, CDRH2, and CDRH3. In some instances, the CDR is a light domain including, but not limited to, CDRL1, CDRL2, and CDRL3. In some instances, the variable domain is variable domain, light chain (VL) or variable domain, heavy chain (VH). In some instances, the CDR1, CDR2, or CDR3 is of a variable domain, light chain (VL). CDR1, CDR2, or CDR3 of a variable domain, light chain (VL) can be referred to as CDRL1, CDRL2, or CDRL3, respectively. CDR1, CDR2, or CDR3 of a variable domain, heavy chain (VH) can be referred to as CDRH1, CDRH2, or CDRH3, respectively. In some instances, the VL domain comprises kappa or lambda chains. In some instances, the constant domain is constant domain, light chain (CL) or constant domain, heavy chain (CH).

[0064] Provided herein are libraries comprising nucleic acids encoding for an antibody comprising variation in at least one region of the antibody, wherein the region is the CDR region. In some instances, the antibody is a single domain antibody comprising one heavy chain variable domain such as a VHH antibody. In some instances, the VHH antibody comprises variation in one or more CDR regions. In some instances, the VHH libraries described herein comprise at least or about 100, 200, 300, 400, 500, 600, 700, 800, 900, 1000, 1200, 1400, 1600, 1800, 2000, 2400, 2600, 2800, 3000, or more than 3000 sequences of a CDR1, CDR2, or CDR3. For example, the libraries comprise at least 2000 sequences of a CDR1, at least 1200 sequences for CDR2, and at least 1600 sequences for CDR3. In some instances, each sequence is non-identical.

[0065] Libraries as described herein may comprise varying lengths of a CDRH1, CDRH2, CDRH3, CDRL1, CDRL2, CDRL3, or combinations thereof of amino acids when translated. In some instances, the length of the CDRH1, CDRH2, CDRH3, CDRL1, CDRL2, CDRL3, or combinations thereof of amino acids when translated is at least or about 5, 6, 7, 8, 9, 10, 11, 12, 13, 14, 15, 16, 17, 18, 19, 20, 21, 22, 23, 24, 25, 26, 27, 28, 29, 30, or more than 30 amino acids.

[0066] Libraries comprising nucleic acids encoding for antibodies having variant CDR sequences as described herein comprise various lengths of amino acids when translated. In some instances, the length of each of the amino acid fragments or average length of the amino acid synthesized may be at least or about 15, 20, 25, 30, 35, 40, 45, 50, 55, 60, 65, 70, 75, 80, 85, 90, 95, 100, 105, 110, 115, 120, 125, 130, 135, 140, 145, 150, or more than 150 amino acids. In some instances, the length of the amino acid is about 15 to 150, 20 to 145, 25 to 140, 30 to 135, 35 to 130, 40 to 125, 45 to 120, 50 to 115, 55 to 110, 60 to 110, 65 to 105, 70 to 100, or 75 to 95 amino acids. In some instances, the length of the amino acid is about 22 amino acids to about 75 amino acids. In some instances, the antibodies comprise at least or about 100, 200, 300, 400, 500, 600, 700, 800, 900, 1000, 2000, 3000, 4000, 5000, or more than 5000 amino acids. In some instances, the library is a VHH library. In some instances, the library is an antibody library.

[0067] Libraries as described herein encoding for a VHH antibody comprise variant CDR sequences that are shuffled to generate a library with a theoretical diversity of at least or about 10⁷, 10⁸, 10⁹, 10¹⁰, 10¹¹, 10¹², 10¹³, 10¹⁴, 10¹⁵, 10¹⁶, 10¹⁷, 10^{18,} or more than 10¹⁸ sequences. In some instances, the library has a final library diversity of at least or about 10⁷, 10⁸, 10⁹, 10¹⁰, 10¹¹, 10¹², 10¹³, 10¹⁴, 10¹⁵, 10¹⁶, 10¹⁷, 10¹⁸, or more than 10¹⁸ sequences.

[0068] Libraries as described herein encoding for an antibody or immunoglobulin comprise variant CDR sequences that are shuffled to generate a library with a theoretical diversity of at least or about 10⁷, 10⁸, 10⁹, 10¹⁰, 10¹¹, 10¹², 10¹³, 10¹⁴, 10¹⁵, 10¹⁶, 10¹⁷, 10¹⁸, or more than 10¹⁸ sequences. In some instances, the library has a final library diversity of at least or about 10⁷, 10⁸, 10⁹, 10¹⁰, 10¹¹, 10¹², 10¹³, 10¹⁴, 10¹⁵, 10¹⁶, 10¹⁷, 10¹⁸, or more than 10¹⁸ sequences.

[0069] Methods described herein provide for synthesis of libraries comprising nucleic acids encoding an antibody or immunoglobulin, wherein each nucleic acid encodes for a predetermined variant of at least one predetermined reference nucleic acid sequence. In some cases, the predetermined reference sequence is a nucleic acid sequence encoding for a protein, and the variant library comprises sequences encoding for variation of at least a single codon such that a plurality of different variants of a single residue in the subsequent protein encoded by the synthesized nucleic acid are generated by standard translation processes. In some instances, the antibody library comprises varied nucleic acids collectively encoding variations at multiple positions. In some instances, the variant library comprises sequences encoding for variation of at least a single codon of a CDRH1, CDRH2, CDRH3, CDRL1, CDRL2, CDRL3, VL, or VH domain. In some instances, the variant library comprises sequences encoding for variation of multiple codons of a CDRH1, CDRH2, CDRH3, CDRL1, CDRL2, CDRL3, VL, or VH domain. In some instances, the variant library comprises sequences encoding for variation of multiple codons of framework element 1 (FW1), framework element 2 (FW2), framework element 3 (FW3), or framework element 4 (FW4). An exemplary number of codons for variation include, but are not limited to, at least or about 1, 5, 10, 15, 20, 25, 30, 35, 40, 45, 50, 55, 60, 65, 70, 75, 80, 85, 90, 95, 100, 125, 150, 175, 225, 250, 275, 300, or more than 300 codons.

[0070] In some instances, the at least one region of the antibody for variation is from heavy chain V-gene family, heavy chain D-gene family, heavy chain J-gene family, light chain V-gene family, or light chain J-gene family. In some instances, the light chain V-gene family comprises immunoglobulin kappa (IGK) gene or immunoglobulin lambda (IGL).

[0071] Provided herein are libraries comprising nucleic acids encoding for antibodies, wherein the libraries are synthesized with various numbers of fragments. In some instances, the fragments comprise the CDRH1, CDRH2, CDRH3, CDRL1, CDRL2, CDRL3, VL, or VH domain. In some instances, the fragments comprise framework element 1 (FW1), framework element 2 (FW2), framework element 3 (FW3), or framework element 4 (FW4). In some instances, the antibody libraries are synthesized with at least or about 2 fragments, 3 fragments, 4 fragments, 5 fragments, or more than 5 fragments. The length of each of the nucleic acid fragments or average length of the nucleic acids synthesized may be at least or about 50, 75, 100, 125, 150, 175, 200, 225, 250, 275, 300, 325, 350, 375, 400, 425, 450, 475, 500, 525, 550, 575, 600, or more than 600 base pairs. In some instances, the length is about 50 to 600, 75 to 575, 100 to 550, 125 to 525, 150 to 500, 175 to 475, 200 to 450, 225 to 425, 250 to 400, 275 to 375, or 300 to 350 base pairs.

[0072] Libraries comprising nucleic acids encoding for antibodies or immunoglobulins as described herein comprise various lengths of amino acids when translated. In some instances, the length of each of the amino acid fragments or average length of the amino acid synthesized may be at least or about 15, 20, 25, 30, 35, 40, 45, 50, 55, 60, 65, 70, 75, 80, 85, 90, 95, 100, 105, 110, 115, 120, 125, 130, 135, 140, 145, 150, or more than 150 amino acids. In some instances, the length of the amino acid is about 15 to 150, 20 to 145, 25 to 140, 30 to 135, 35 to 130, 40 to 125, 45 to 120, 50 to 115, 55 to 110, 60 to 110, 65 to 105, 70 to 100, or 75 to 95 amino acids. In some instances, the length of the amino acid is about 22 amino acids to about 75 amino acids. In some instances, the antibodies comprise at least or about 100, 200, 300, 400, 500, 600, 700, 800, 900, 1000, 2000, 3000, 4000, 5000, or more than 5000 amino acids.

[0073] A number of variant sequences for the at least one region of the antibody for variation are de novo synthesized using methods as described herein. In some instances, a number of variant sequences is de novo synthesized for CDRH1, CDRH2, CDRH3, CDRL1, CDRL2, CDRL3, VL, VH, or combinations thereof. In some instances, a number of variant sequences is de novo synthesized for framework element 1 (FW1), framework element 2 (FW2), framework element 3 (FW3), or framework element 4 (FW4). The number of variant sequences may be at least or about 5, 10, 15, 20, 25, 30, 35, 40, 45, 50, 55, 60, 65, 70, 75, 80, 85, 90, 95, 100, 125, 150, 175, 200, 225, 250, 275, 300, 325, 350, 375, 400, 425, 450, 475, 500, or more than 500 sequences. In some instances, the number of variant sequences is at least or about 500, 600, 700, 800, 900, 1000, 2000, 3000, 4000, 5000, 6000, 7000, 8000, or more than 8000 sequences. In some instances, the number of variant sequences is about 10 to 500, 25 to 475, 50 to 450, 75 to 425, 100 to 400, 125 to 375, 150 to 350, 175 to 325, 200 to 300, 225 to 375, 250 to 350, or 275 to 325 sequences.

[0074] Variant sequences for the at least one region of the antibody, in some instances, vary in length or sequence. In some instances, the at least one region that is de novo synthesized is for CDRH1, CDRH2, CDRH3, CDRL1, CDRL2, CDRL3, VL, VH, or combinations thereof. In some instances, the at least one region that is de novo synthesized is for framework element 1 (FW1), framework element 2 (FW2), framework element 3 (FW3), or framework element 4 (FW4). In some instances, the variant sequence comprises at least or about 1, 2, 3, 4, 5, 6, 7, 8, 9, 10, 15, 20, 25, 30, 35, 40, 45, 50, or more than 50 variant nucleotides or amino acids as compared to wild-type. In some instances, the variant sequence comprises at least or about 1, 2, 3, 4, 5, 6, 7, 8, 9, 10, 15, 20, 25, 30, 35, 40, 45, or 50 additional nucleotides or amino acids as compared to wild-type. In some instances, the variant sequence comprises at least or about 1, 2, 3, 4, 5, 6, 7, 8, 9, 10, 15, 20, 25, 30, 35, 40, 45, or 50 less nucleotides or amino acids as compared to wild-type. In some instances, the libraries comprise at least or about 10¹, 10², 10³, 10⁴, 10⁵, 10⁶, 10⁷, 10⁸, 10⁹, 10¹⁰, or more than 10¹⁰ variants.

[0075] Following synthesis of antibody libraries, antibody libraries may be used for screening and analysis. For example, antibody libraries are assayed for library displayability and panning. In some instances, displayability is assayed using a selectable tag. Exemplary tags include, but are not limited to, a radioactive label, a fluorescent label, an enzyme, a chemiluminescent tag, a colorimetric tag, an affinity tag or other labels or tags that are known in the art. In some instances, the tag is histidine, polyhistidine, myc, hemagglutinin (HA), or FLAG. For example, as seen in FIG. 2B. In some instances, antibody libraries are assayed by sequencing using various methods including, but not limited to, single-molecule real-time (SMRT) sequencing, Polony sequencing, sequencing by ligation, reversible terminator sequencing, proton detection sequencing, ion semiconductor sequencing, nanopore sequencing, electronic sequencing, pyrosequencing, Maxam-Gilbert sequencing, chain termination (e.g., Sanger) sequencing, +S sequencing, or sequencing by synthesis. In some instances, antibody libraries are displayed on the surface of a cell or phage. In some instances, antibody libraries are enriched for sequences with a desired activity using phage display.

[0076] In some instances, the antibody libraries are assayed for functional activity, structural stability (e.g., thermal stable or pH stable), expression, specificity, or a combination thereof. In some instances, the antibody libraries are assayed for antibody capable of folding. In some instances, a region of the antibody is assayed for functional activity, structural stability, expression, specificity, folding, or a combination thereof. For example, a VH region or VL region is assayed for functional activity, structural stability, expression, specificity, folding, or a combination thereof.

[0077] Antibodies or IgGs generated by methods as described herein comprise improved binding affinity. In some instances, the antibody comprises a binding affinity (e.g., K_{D})) of less than 1 nM, less than 1.2 nM, less than 2 nM, less than 5 nM, less than 10 nM, less than 11 nm, less than 13.5 nM, less than 15 nM, less than 20 nM, less than 25 nM, or less than 30 nM. In some instances, the antibody comprises a K_{D} of less than 400 nM, less than 350 nM, less than 300 nM, less than 250 nM, less than 200 nM, less than 150 nm, less than 100 nM, less than 50 nM, less than 25 nM, less than 15 nM, or less than 10 nM. In some instances, the antibody comprises a K_{D} of less than 1 nM. In some instances, the antibody comprises a K_{D} of less than 1.2 nM. In some instances, the antibody comprises a K_{D} of less than 2 nM. In some instances, the antibody comprises a K_{D} of less than 5 nM. In some instances, the antibody comprises a K_{D} of less than 10 nM. In some instances, the antibody comprises a K_{D} of less than 13.5 nM. In some instances, the antibody comprises a K_{D} of less than 15 nM. In some instances, the antibody comprises a K_{D} of less than 20 nM. In some instances, the antibody comprises a K_{D} of less than 25 nM. In some instances, the antibody comprises a K_{D} of less than 30 nM.

[0078] In some instances, the affinity of antibodies or IgGs generated by methods as described herein is at least or about 1.5×, 2.0×, 5×, 10×, 20×, 30×, 40×, 50×, 60×, 70×, 80×, 90×, 100×, 200×, or more than 200× improved binding affinity as compared to a comparator antibody. In some instances, the affinity of antibodies or IgGs generated by methods as described herein is at least or about 1.5×, 2.0×, 5×, 10×, 20×, 30×, 40×, 50×, 60×, 70×, 80×, 90×, 100×, 200×, or more than 200× improved function as compared to a comparator antibody. In some instances, the comparator antibody is an antibody with similar structure, sequence, or antigen target.

[0079] Methods as described herein, in some instances, result in increased yield of antibodies or IgGs. In some instances, the yield is at least or about 5, 10, 15, 20, 25, 30, 35, 40, 45, 50, 55, 60, 65, 70, 75, 80, or more than 80 micrograms (ug). In some instances, the yield is in a range of about 5 to about 80, about 10 to about 75, about 15 to about 60, about 20 to about 50, or about 30 to about 40 micrograms (ug).

### Expression Systems

[0080] Provided herein are libraries comprising nucleic acids encoding for antibody comprising binding domains, wherein the libraries have improved specificity, stability, expression, folding, or downstream activity. In some instances, libraries described herein are used for screening and analysis.

[0081] Provided herein are libraries comprising nucleic acids encoding for antibody comprising binding domains, wherein the nucleic acid libraries are used for screening and analysis. In some instances, screening and analysis comprises in vitro, in vivo, or ex vivo assays. Cells for screening include primary cells taken from living subjects or cell lines. Cells may be from prokaryotes (e.g., bacteria and fungi) or eukaryotes (e.g., animals and plants). Exemplary animal cells include, without limitation, those from a mouse, rabbit, primate, and insect. In some instances, cells for screening include a cell line including, but not limited to, Chinese Hamster Ovary (CHO) cell line, human embryonic kidney (HEK) cell line, or baby hamster kidney (BHK) cell line. In some instances, nucleic acid libraries described herein may also be delivered to a multicellular organism. Exemplary multicellular organisms include, without limitation, a plant, a mouse, rabbit, primate, and insect.

[0082] Nucleic acid libraries described herein may be screened for various pharmacological or pharmacokinetic properties. In some instances, the libraries are screened using in vitro assays, in vivo assays, or ex vivo assays. For example, in vitro pharmacological or pharmacokinetic properties that are screened include, but are not limited to, binding affinity, binding specificity, and binding avidity. Exemplary in vivo pharmacological or pharmacokinetic properties of libraries described herein that are screened include, but are not limited to, therapeutic efficacy, activity, preclinical toxicity properties, clinical efficacy properties, clinical toxicity properties, immunogenicity, potency, and clinical safety properties.

[0083] Provided herein are nucleic acid libraries, wherein the nucleic acid libraries may be expressed in a vector. Expression vectors for inserting nucleic acid libraries disclosed herein may comprise eukaryotic or prokaryotic expression vectors. Exemplary expression vectors include, without limitation, mammalian expression vectors: pSF-CMV-NEO-NH2-PPT-3XFLAG, pSF-CMV-NEO-COOH-3XFLAG, pSF-CMV-PURO-NH2-GST-TEV, pSF-OXB20-COOH-TEV-FLAG(R)-6His, pCEP4 pDEST27, pSF-CMV-Ub-KrYFP, pSF-CMV-FMDV-daGFP, pEF1a-mCherry-N1 Vector, pEF1a-tdTomato Vector, pSF-CMV-FMDV-Hygro, pSF-CMV-PGK-Puro, pMCP-tag (m), and pSF-CMV-PURO-NH2-CMYC; bacterial expression vectors: pSF-OXB20-BetaGal,pSF-OXB20-Fluc, pSF-OXB20, and pSF-Tac; plant expression vectors: pRI 101-AN DNA and pCambia2301; and yeast expression vectors: pTYB21 and pKLAC2, and insect vectors: pAc5.1/V5-His A and pDEST8. In some instances, the vector is pcDNA3 or pcDNA3.1.

[0084] Described herein are nucleic acid libraries that are expressed in a vector to generate a construct comprising an antibody. In some instances, a size of the construct varies. In some instances, the construct comprises at least or about 500, 600, 700, 800, 900, 1000, 1100, 1300, 1400, 1500, 1600, 1700, 1800, 2000, 2400, 2600, 2800, 3000, 3200, 3400, 3600, 3800, 4000, 4200, 4400, 4600, 4800, 5000, 6000, 7000, 8000, 9000, 10000, or more than 10000 bases. In some instances, a the construct comprises a range of about 300 to 1,000, 300 to 2,000, 300 to 3,000, 300 to 4,000, 300 to 5,000, 300 to 6,000, 300 to 7,000, 300 to 8,000, 300 to 9,000, 300 to 10,000, 1,000 to 2,000, 1,000 to 3,000, 1,000 to 4,000, 1,000 to 5,000, 1,000 to 6,000, 1,000 to 7,000, 1,000 to 8,000, 1,000 to 9,000, 1,000 to 10,000, 2,000 to 3,000, 2,000 to 4,000, 2,000 to 5,000, 2,000 to 6,000, 2,000 to 7,000, 2,000 to 8,000, 2,000 to 9,000, 2,000 to 10,000, 3,000 to 4,000, 3,000 to 5,000, 3,000 to 6,000, 3,000 to 7,000, 3,000 to 8,000, 3,000 to 9,000, 3,000 to 10,000, 4,000 to 5,000, 4,000 to 6,000, 4,000 to 7,000, 4,000 to 8,000, 4,000 to 9,000, 4,000 to 10,000, 5,000 to 6,000, 5,000 to 7,000, 5,000 to 8,000, 5,000 to 9,000, 5,000 to 10,000, 6,000 to 7,000, 6,000 to 8,000, 6,000 to 9,000, 6,000 to 10,000, 7,000 to 8,000, 7,000 to 9,000, 7,000 to 10,000, 8,000 to 9,000, 8,000 to 10,000, or 9,000 to 10,000 bases.

[0085] Provided herein are libraries comprising nucleic acids encoding for antibodies, wherein the nucleic acid libraries are expressed in a cell. In some instances, the libraries are synthesized to express a reporter gene. Exemplary reporter genes include, but are not limited to, acetohydroxyacid synthase (AHAS), alkaline phosphatase (AP), beta galactosidase (LacZ), beta glucoronidase (GUS), chloramphenicol acetyltransferase (CAT), green fluorescent protein (GFP), red fluorescent protein (RFP), yellow fluorescent protein (YFP), cyan fluorescent protein (CFP), cerulean fluorescent protein, citrine fluorescent protein, orange fluorescent protein, cherry fluorescent protein, turquoise fluorescent protein, blue fluorescent protein, horseradish peroxidase (HRP), luciferase (Luc), nopaline synthase (NOS), octopine synthase (OCS), luciferase, and derivatives thereof. Methods to determine modulation of a reporter gene are well known in the art, and include, but are not limited to, fluorometric methods (e.g. fluorescence spectroscopy, Fluorescence Activated Cell Sorting (FACS), fluorescence microscopy), and antibiotic resistance determination.

### Diseases and Disorders

[0086] Provided herein are libraries comprising nucleic acids encoding for antibodies or immunoglobulins including VHH antibodies that may have therapeutic effects. In some instances, the antibodies or immunoglobulin result in protein when translated that is used to treat a disease or disorder in a subject. Exemplary diseases include, but are not limited to, cancer, inflammatory diseases or disorders, a metabolic disease or disorder, a cardiovascular disease or disorder, a respiratory disease or disorder, pain, a digestive disease or disorder, a reproductive disease or disorder, an endocrine disease or disorder, or a neurological disease or disorder. In some instances, the cancer is a solid cancer or a hematologic cancer. In some instances, the subject is a mammal. In some instances, the subject is a mouse, rabbit, dog, or human. Subjects treated by methods described herein may be infants, adults, or children. Pharmaceutical compositions comprising antibodies or antibody fragments as described herein may be administered intravenously or subcutaneously.

[0087] In some instances, the disease or disorder is associated with TIGIT dysfunction. In some instances, the disease or disorder is associated with aberrant signaling via TIGIT. In some instances, the disease or disorder is associated with CD3 dysfunction. In some instances, the disease or disorder is associated with aberrant signaling via CD3. In some instances, the disease or disorder is cancer. In some instances, the disease or disorder is a viral infection.

### Protein Targets

[0088] Provided herein are libraries comprising nucleic acids encoding for antibodies or immunoglobulins including VHH antibodies that may be designed for various protein targets. In some instances, the protein is an ion channel, G protein-coupled receptor, tyrosine kinase receptor, an immune receptor, a membrane protein, or combinations thereof. In some instances, the protein is a receptor. In some instances, the protein is Glucagon-like peptide 1 (GLP1) receptor. In some instances, the protein is Prostaglandin D2 receptor 2 (DP2 or CRTH2) receptor. In some instances, the protein is an adenosine A2A receptor. In some instances, the protein is T cell immunoreceptor with Ig and ITIM domains (TIGIT). In some instances, the protein is Cluster of Differentiation 47 (CD47). In some instances, the protein is Cluster of Differentiation 3 epsilon (CD3ε).

[0089] Provided herein are antibodies or immunoglobulins, wherein the antibody or immunoglobulin comprises a sequence at least or about 70%, 80%, 85%, 90%, 91%, 92%, 93%, 94%, 95%, 96%, 97%, 98%, 99%, or 100% sequence identity to any one of SEQ ID NOs: 1-151. In some instances, the antibody or immunoglobulin sequence comprises at least or about 95% sequence identity to any one of SEQ ID NOs: 1-151. In some instances, the antibody or immunoglobulin sequence comprises at least or about 97% sequence identity to any one of SEQ ID NOs: 1-151. In some instances, the antibody or immunoglobulin sequence comprises at least or about 99% sequence identity to any one of SEQ ID NOs: 1-151. In some instances, the antibody or immunoglobulin sequence comprises at least or about 100% sequence identity to any one SEQ ID NOs: 1-151. In some instances, the antibody or immunoglobulin sequence comprises at least a portion having at least or about 1, 2, 3, 4, 5, 6, 7, 8, 9, 10, 12, 14, 16, 18, 20, 30, 40, 50, 60, 70, 80, 90, 100, 110, 120, 130, 140, 150, 160, 170, 180, 190, 200, 210, 220, 230, 240, 250, 260, 270, 280, 290, 300, 310, 320, 330, 340, 350, 360, 370, 380, 390, 400, or more than 400 amino acids of any one of SEQ ID NOs: 1-151.

[0090] In some embodiments, the antibody or immunoglobulin sequence comprises complementarity determining regions (CDRs) comprising a sequence as set forth in Table 1A, Table 14B, Table 17, and Table 20. In some embodiments, the antibody or immunoglobulin sequence comprises complementarity determining regions (CDRs) comprising at least or about 70%, 80%, 85%, 90%, 91%, 92%, 93%, 94%, 95%, 96%, 97%, 98%, 99%, or 100% sequence identity to any one of SEQ ID NOs: 46-83, 118-137, or 152-163. In some instances, the antibody or immunoglobulin sequence comprises complementarity determining regions (CDRs) comprising at least or about 95% homology to any one of SEQ ID NOs: 46-83, 118-137, or 152-163. In some instances, the antibody or immunoglobulin sequence comprises complementarity determining regions (CDRs) comprising at least or about 97% homology to any one of SEQ ID NOs: 46-83, 118-137, or 152-163. In some instances, the antibody or immunoglobulin sequence comprises complementarity determining regions (CDRs) comprising at least or about 99% homology to any one of SEQ ID NOs: 46-83, 118-137, or 152-163. In some instances, the antibody or immunoglobulin sequence comprises complementarity determining regions (CDRs) comprising at least or about 100% homology to any one of SEQ ID NOs: 46-83, 118-137, or 152-163. In some instances, the antibody or immunoglobulin sequence comprises complementarity determining regions (CDRs) comprising at least a portion having at least or about 3, 4, 5, 6, 7, 8, 9, 10, 12, 14, 16, or more than 16 amino acids of any one of SEQ ID NOs: 46-83, 118-137, or 152-163.

TABLE 1A

| Construct | Amino | SEQ ID |
|---|---|---|
| Description | Acid Sequence | NO |
| IGHV1-69 CDRH1 | GGTFSSYA | 152 |
| IGHV1-69 CDRH2 | IIPIFGTA | 153 |
| IGHV1-69 CDRH3 | CARNNNNNNNNNFDYW | 154 |
| IGHV3-23 CDRH1 | GFTFSSYA | 155 |
| IGHV3-23 CDRH2 | ISGSGGST | 156 |
| IGHV3-23 CDRH3 | CAKNNNNNNNNNFDYW | 157 |
| IGKV1-39 CDRL1 | QSISSY | 158 |
| IGKV1-39 CDRL2 | AAS | 159 |
| IGKV1-39 CDRL3 | CQQSYSTPNTF | 160 |
| IGKV3-20 CDRL1 | QSVSSSY | 161 |
| IGKV3-20 CDRL2 | GAS | 162 |
| IGKV3-20 CDRL3 | CQQYGSSPNTF | 163 |

[0091] In some embodiments, the antibody or immunoglobulin sequence comprises a CDR1 comprising at least or about 70%, 80%, 85%, 90%, 91%, 92%, 93%, 94%, 95%, 96%, 97%, 98%, 99%, or 100% sequence identity to any one of SEQ ID NOs: 118-120, 129-131, 152, 155, 158, or 161. In some instances, the antibody or immunoglobulin sequence comprises CDR1 comprising at least or about 95% homology of any one of SEQ ID NOs: 118-120, 129-131, 152, 155, 158, or 161.In some instances, the antibody or immunoglobulin sequence comprises CDR1 comprising at least or about 97% homology to any one of SEQ ID NOs: 118-120, 129-131, 152, 155, 158, or 161. In some instances, the antibody or immunoglobulin sequence comprises CDR1 comprising at least or about 99% homology to any one of SEQ ID NOs: 118-120, 152, 155, 158, or 161. In some instances, the antibody or immunoglobulin sequence comprises CDR1 comprising at least or about 100% homology to any one of SEQ ID NOs: 118-120, 129-131, 152, 155, 158, or 161. In some instances, the antibody or immunoglobulin sequence comprises CDR1 comprising at least a portion having at least or about 3, 4, 5, 6, 7, 8, 9, 10, 12, 14, 16, or more than 16 amino acids of any one of SEQ ID NOs: 118-120, 129-131, 152, 155, 158, or 161.

[0092] In some embodiments, the antibody or immunoglobulin sequence comprises a CDR2 comprising at least or about 70%, 80%, 85%, 90%, 91%, 92%, 93%, 94%, 95%, 96%, 97%, 98%, 99%, or 100% sequence identity to any one of SEQ ID NOs: 121-123, 132-134, 153, 156, 159, or 162. In some instances, the antibody or immunoglobulin sequence comprises CDR2 comprising at least or about 95% homology to any one of SEQ ID NOs: 121-123, 132-134, 153, 156, 159, or 162. In some instances, the antibody or immunoglobulin sequence comprises CDR2 comprising at least or about 97% homology to any one of SEQ ID NOs: 121-123, 132-134, 153, 156, 159, or 162. In some instances, the antibody or immunoglobulin sequence comprises CDR2 comprising at least or about 99% homology to any one of SEQ ID NOs: 121-123, 132-134, 153, 156, 159, or 162. In some instances, the antibody or immunoglobulin sequence comprises CDR2 comprising at least or about 100% homology to any one of SEQ ID NOs: 121-123, 132-134, 153, 156, 159, or 162. In some instances, the antibody or immunoglobulin sequence comprises CDR2 comprising at least a portion having at least or about 3, 4, 5, 6, 7, 8, 9, 10, 12, 14, 16, or more than 16 amino acids of any one of SEQ ID NOs: 121-123, 132-134, 153, 156, 159, or 162.

[0093] In some embodiments, the antibody or immunoglobulin sequence comprises a CDR3 comprising at least or about 70%, 80%, 85%, 90%, 91%, 92%, 93%, 94%, 95%, 96%, 97%, 98%, 99%, or 100% sequence identity to any one of SEQ ID NOs: 46-83, 124-128, 154, 157, 160, or 163. In some instances, the antibody or immunoglobulin sequence comprises CDR3 comprising at least or about 95% homology to any one of SEQ ID NOs: 46-83, 124-128, 125-137, 154, 157, 160, or 163. In some instances, the antibody or immunoglobulin sequence comprises CDR3 comprising at least or about 97% homology to any one of SEQ ID NOs: 46-83, 124-128, 125-137, 124-128, 154, 157, 160, or 163. In some instances, the antibody or immunoglobulin sequence comprises CDR3 comprising at least or about 99% homology to any one of SEQ ID NOs: 46-83, 124-128, 125-137, 124-128, 154, 157, 160, or 163. In some instances, the antibody or immunoglobulin sequence comprises CDR3 comprising at least or about 100% homology to any one of SEQ ID NOs: 46-83, 124-128, 125-137, 124-128, 154, 157, 160, or 163. In some instances, the antibody or immunoglobulin sequence comprises CDR3 comprising at least a portion having at least or about 3, 4, 5, 6, 7, 8, 9, 10, 12, 14, 16, or more than 16 amino acids of any one of SEQ ID NOs: 46-83, 124-128, 125-137, 124-128, 154, 157, 160, or 163.

[0094] In some embodiments, the antibody or immunoglobulin sequence comprises a CDRH1 comprising at least or about 70%, 80%, 85%, 90%, 91%, 92%, 93%, 94%, 95%, 96%, 97%, 98%, 99%, or 100% sequence identity to any one of SEQ ID NOs: 152; a CDRH2 comprising at least or about 70%, 80%, 85%, 90%, 91%, 92%, 93%, 94%, 95%, 96%, 97%, 98%, 99%, or 100% sequence identity to any one of SEQ ID NOs: 153; and a CDRH3 comprising at least or about 70%, 80%, 85%, 90%, 91%, 92%, 93%, 94%, 95%, 96%, 97%, 98%, 99%, or 100% sequence identity to any one of SEQ ID NOs: 154. In some instances, the antibody or immunoglobulin sequence comprises CDRH1 comprising at least or about 95%, 97%, 99%, or 100% homology to any one of SEQ ID NOs: 152; a CDRH2 comprising at least or about 95%, 97%, 99%, or 100% homology to any one of SEQ ID NOs: 153; and a CDRH3 comprising at least or about 95%, 97%, 99%, or 100% homology to any one of SEQ ID NOs: 154. In some instances, the antibody or immunoglobulin sequence comprises CDRH1 comprising at least a portion having at least or about 3, 4, 5, 6, 7, 8, 9, 10, 12, 14, 16, or more than 16 amino acids of SEQ ID NO: 152; a CDRH2 comprising at least a portion having at least or about 3, 4, 5, 6, 7, 8, 9, 10, 12, 14, 16, or more than 16 amino acids of SEQ ID NO: 153; and a CDRH3 comprising at least a portion having at least or about 3, 4, 5, 6, 7, 8, 9, 10, 12, 14, 16, or more than 16 amino acids of SEQ ID NO: 154.

[0095] In some embodiments, the antibody or immunoglobulin sequence comprises a CDRH1 comprising at least or about 70%, 80%, 85%, 90%, 91%, 92%, 93%, 94%, 95%, 96%, 97%, 98%, 99%, or 100% sequence identity to SEQ ID NO: 155; a CDRH2 comprising at least or about 70%, 80%, 85%, 90%, 91%, 92%, 93%, 94%, 95%, 96%, 97%, 98%, 99%, or 100% sequence identity to SEQ ID NO: 156; and a CDRH3 comprising at least or about 70%, 80%, 85%, 90%, 91%, 92%, 93%, 94%, 95%, 96%, 97%, 98%, 99%, or 100% sequence identity to SEQ ID NO: 157. In some instances, the antibody or immunoglobulin sequence comprises CDRH1 comprising at least or about 95%, 97%, 99%, or 100% homology to SEQ ID NO: 155; a CDRH2 comprising at least or about 95%, 97%, 99%, or 100% homology to SEQ ID NO: 156; and a CDRH3 comprising at least or about 95%, 97%, 99%, or 100% homology to SEQ ID NO: 157. In some instances, the antibody or immunoglobulin sequence comprises CDRH1 comprising at least a portion having at least or about 3, 4, 5, 6, 7, 8, 9, 10, 12, 14, 16, or more than 16 amino acids of SEQ ID NO: 155; a CDRH2 comprising at least a portion having at least or about 3, 4, 5, 6, 7, 8, 9, 10, 12, 14, 16, or more than 16 amino acids of SEQ ID NO: 156; and a CDRH3 comprising at least a portion having at least or about 3, 4, 5, 6, 7, 8, 9, 10, 12, 14, 16, or more than 16 amino acids of SEQ ID NO: 157.

[0096] In some embodiments, the antibody or immunoglobulin sequence comprises a CDRL1 comprising at least or about 70%, 80%, 85%, 90%, 91%, 92%, 93%, 94%, 95%, 96%, 97%, 98%, 99%, or 100% sequence identity to SEQ ID NO: 158; a CDRL2 comprising at least or about 70%, 80%, 85%, 90%, 91%, 92%, 93%, 94%, 95%, 96%, 97%, 98%, 99%, or 100% sequence identity to SEQ ID NO: 159; and a CDRL3 comprising at least or about 70%, 80%, 85%, 90%, 91%, 92%, 93%, 94%, 95%, 96%, 97%, 98%, 99%, or 100% sequence identity to SEQ ID NO: 160. In some instances, the antibody or immunoglobulin sequence comprises CDRL1 comprising at least or about 95%, 97%, 99%, or 100% homology to SEQ ID NO: 158; a CDRL2 comprising at least or about 95%, 97%, 99%, or 100% homology to SEQ ID NO: 159; and a CDRL3 comprising at least or about 95%, 97%, 99%, or 100% homology to SEQ ID NO: 160. In some instances, the antibody or immunoglobulin sequence comprises CDRL1 comprising at least a portion having at least or about 3, 4, 5, 6, 7, 8, 9, 10, 12, 14, 16, or more than 16 amino acids of SEQ ID NO: 158; a CDRL2 comprising at least a portion having at least or about 3, 4, 5, 6, 7, 8, 9, 10, 12, 14, 16, or more than 16 amino acids of SEQ ID NO: 159; and a CDRL3 comprising at least a portion having at least or about 3, 4, 5, 6, 7, 8, 9, 10, 12, 14, 16, or more than 16 amino acids of SEQ ID NO: 160.

[0097] In some embodiments, the antibody or immunoglobulin sequence comprises a CDRL1 comprising at least or about 70%, 80%, 85%, 90%, 91%, 92%, 93%, 94%, 95%, 96%, 97%, 98%, 99%, or 100% sequence identity to SEQ ID NO: 161; a CDRL2 comprising at least or about 70%, 80%, 85%, 90%, 91%, 92%, 93%, 94%, 95%, 96%, 97%, 98%, 99%, or 100% sequence identity to SEQ ID NO: 162; and a CDRL3 comprising at least or about 70%, 80%, 85%, 90%, 91%, 92%, 93%, 94%, 95%, 96%, 97%, 98%, 99%, or 100% sequence identity to SEQ ID NO: 163. In some instances, the antibody or immunoglobulin sequence comprises CDRL1 comprising at least or about 95%, 97%, 99%, or 100% homology to SEQ ID NO: 161; a CDRL2 comprising at least or about 95%, 97%, 99%, or 100% homology to SEQ ID NO: 162; and a CDRL3 comprising at least or about 95%, 97%, 99%, or 100% homology to SEQ ID NO: 163. In some instances, the antibody or immunoglobulin sequence comprises CDRL1 comprising at least a portion having at least or about 3, 4, 5, 6, 7, 8, 9, 10, 12, 14, 16, or more than 16 amino acids of SEQ ID NO: 161; a CDRL2 comprising at least a portion having at least or about 3, 4, 5, 6, 7, 8, 9, 10, 12, 14, 16, or more than 16 amino acids of SEQ ID NO: 162; and a CDRL3 comprising at least a portion having at least or about 3, 4, 5, 6, 7, 8, 9, 10, 12, 14, 16, or more than 16 amino acids of SEQ ID NO: 163.

[0098] In some embodiments, the antibody or immunoglobulin sequence comprises a CDRH1 comprising at least or about 70%, 80%, 85%, 90%, 91%, 92%, 93%, 94%, 95%, 96%, 97%, 98%, 99%, or 100% sequence identity to SEQ ID NO: 152; a CDRH2 comprising at least or about 70%, 80%, 85%, 90%, 91%, 92%, 93%, 94%, 95%, 96%, 97%, 98%, 99%, or 100% sequence identity to SEQ ID NO: 153; a CDRH3 comprising at least or about 70%, 80%, 85%, 90%, 91%, 92%, 93%, 94%, 95%, 96%, 97%, 98%, 99%, or 100% sequence identity to SEQ ID NO: 154, a CDRL1 comprising at least or about 70%, 80%, 85%, 90%, 91%, 92%, 93%, 94%, 95%, 96%, 97%, 98%, 99%, or 100% sequence identity to SEQ ID NO: 158; a CDRL2 comprising at least or about 70%, 80%, 85%, 90%, 91%, 92%, 93%, 94%, 95%, 96%, 97%, 98%, 99%, or 100% sequence identity to SEQ ID NO: 159; and a CDRL3 comprising at least or about 70%, 80%, 85%, 90%, 91%, 92%, 93%, 94%, 95%, 96%, 97%, 98%, 99%, or 100% sequence identity to SEQ ID NO: 160. In some instances, the antibody or immunoglobulin sequence comprises CDRH1 comprising at least or about 95%, 97%, 99%, or 100% homology to SEQ ID NO: 152; a CDRH2 comprising at least or about 95%, 97%, 99%, or 100% homology to SEQ ID NO: 153; a CDRH3 comprising at least or about 95%, 97%, 99%, or 100% homology to SEQ ID NO: 154; a CDRL1 comprising at least or about 95%, 97%, 99%, or 100% homology to SEQ ID NO: 158; a CDRL2 comprising at least or about 95%, 97%, 99%, or 100% homology to SEQ ID NO: 159; and a CDRL3 comprising at least or about 95%, 97%, 99%, or 100% homology to SEQ ID NO: 160. In some instances, the antibody or immunoglobulin sequence comprises CDRH1 comprising at least a portion having at least or about 3, 4, 5, 6, 7, 8, 9, 10, 12, 14, 16, or more than 16 amino acids of SEQ ID NO: 152; a CDRH2 comprising at least a portion having at least or about 3, 4, 5, 6, 7, 8, 9, 10, 12, 14, 16, or more than 16 amino acids of SEQ ID NO: 153; a CDRH3 comprising at least a portion having at least or about 3, 4, 5, 6, 7, 8, 9, 10, 12, 14, 16, or more than 16 amino acids of SEQ ID NO: 154; a CDRL1 comprising at least a portion having at least or about 3, 4, 5, 6, 7, 8, 9, 10, 12, 14, 16, or more than 16 amino acids of SEQ ID NO: 158; a CDRL2 comprising at least a portion having at least or about 3, 4, 5, 6, 7, 8, 9, 10, 12, 14, 16, or more than 16 amino acids of SEQ ID NO: 159; and a CDRL3 comprising at least a portion having at least or about 3, 4, 5, 6, 7, 8, 9, 10, 12, 14, 16, or more than 16 amino acids of SEQ ID NO: 160.

[0099] In some embodiments, the antibody or immunoglobulin sequence comprises a CDRH1 comprising at least or about 70%, 80%, 85%, 90%, 91%, 92%, 93%, 94%, 95%, 96%, 97%, 98%, 99%, or 100% sequence identity to SEQ ID NO: 152; a CDRH2 comprising at least or about 70%, 80%, 85%, 90%, 91%, 92%, 93%, 94%, 95%, 96%, 97%, 98%, 99%, or 100% sequence identity to SEQ ID NO: 153; a CDRH3 comprising at least or about 70%, 80%, 85%, 90%, 91%, 92%, 93%, 94%, 95%, 96%, 97%, 98%, 99%, or 100% sequence identity to SEQ ID NO: 154, a CDRL1 comprising at least or about 70%, 80%, 85%, 90%, 91%, 92%, 93%, 94%, 95%, 96%, 97%, 98%, 99%, or 100% sequence identity to SEQ ID NO: 161; a CDRL2 comprising at least or about 70%, 80%, 85%, 90%, 91%, 92%, 93%, 94%, 95%, 96%, 97%, 98%, 99%, or 100% sequence identity to SEQ ID NO: 162; and a CDRL3 comprising at least or about 70%, 80%, 85%, 90%, 91%, 92%, 93%, 94%, 95%, 96%, 97%, 98%, 99%, or 100% sequence identity to SEQ ID NO: 163. In some instances, the antibody or immunoglobulin sequence comprises CDRH1 comprising at least or about 95%, 97%, 99%, or 100% homology to SEQ ID NO: 152; a CDRH2 comprising at least or about 95%, 97%, 99%, or 100% homology to SEQ ID NO: 153; a CDRH3 comprising at least or about 95%, 97%, 99%, or 100% homology to SEQ ID NO: 154; a CDRL1 comprising at least or about 95%, 97%, 99%, or 100% homology to SEQ ID NO: 161; a CDRL2 comprising at least or about 95%, 97%, 99%, or 100% homology to SEQ ID NO: 162; and a CDRL3 comprising at least or about 95%, 97%, 99%, or 100% homology to SEQ ID NO: 163. In some instances, the antibody or immunoglobulin sequence comprises CDRH1 comprising at least a portion having at least or about 3, 4, 5, 6, 7, 8, 9, 10, 12, 14, 16, or more than 16 amino acids of SEQ ID NO: 152; a CDRH2 comprising at least a portion having at least or about 3, 4, 5, 6, 7, 8, 9, 10, 12, 14, 16, or more than 16 amino acids of SEQ ID NO: 153; a CDRH3 comprising at least a portion having at least or about 3, 4, 5, 6, 7, 8, 9, 10, 12, 14, 16, or more than 16 amino acids of SEQ ID NO: 154; a CDRL1 comprising at least a portion having at least or about 3, 4, 5, 6, 7, 8, 9, 10, 12, 14, 16, or more than 16 amino acids of SEQ ID NO: 161; a CDRL2 comprising at least a portion having at least or about 3, 4, 5, 6, 7, 8, 9, 10, 12, 14, 16, or more than 16 amino acids of SEQ ID NO: 162; and a CDRL3 comprising at least a portion having at least or about 3, 4, 5, 6, 7, 8, 9, 10, 12, 14, 16, or more than 16 amino acids of SEQ ID NO: 163.

[0100] In some embodiments, the antibody or immunoglobulin sequence comprises a CDRH1 comprising at least or about 70%, 80%, 85%, 90%, 91%, 92%, 93%, 94%, 95%, 96%, 97%, 98%, 99%, or 100% sequence identity to SEQ ID NO: 155; a CDRH2 comprising at least or about 70%, 80%, 85%, 90%, 91%, 92%, 93%, 94%, 95%, 96%, 97%, 98%, 99%, or 100% sequence identity to SEQ ID NO: 156; a CDRH3 comprising at least or about 70%, 80%, 85%, 90%, 91%, 92%, 93%, 94%, 95%, 96%, 97%, 98%, 99%, or 100% sequence identity to SEQ ID NO: 157, a CDRL1 comprising at least or about 70%, 80%, 85%, 90%, 91%, 92%, 93%, 94%, 95%, 96%, 97%, 98%, 99%, or 100% sequence identity to SEQ ID NO: 158; a CDRL2 comprising at least or about 70%, 80%, 85%, 90%, 91%, 92%, 93%, 94%, 95%, 96%, 97%, 98%, 99%, or 100% sequence identity to SEQ ID NO: 159; and a CDRL3 comprising at least or about 70%, 80%, 85%, 90%, 91%, 92%, 93%, 94%, 95%, 96%, 97%, 98%, 99%, or 100% sequence identity to SEQ ID NO: 160. In some instances, the antibody or immunoglobulin sequence comprises CDRH1 comprising at least or about 95%, 97%, 99%, or 100% homology to SEQ ID NO: 155; a CDRH2 comprising at least or about 95%, 97%, 99%, or 100% homology to SEQ ID NO: 156; a CDRH3 comprising at least or about 95%, 97%, 99%, or 100% homology to SEQ ID NO: 157; a CDRL1 comprising at least or about 95%, 97%, 99%, or 100% homology to SEQ ID NO: 158; a CDRL2 comprising at least or about 95%, 97%, 99%, or 100% homology to SEQ ID NO: 159; and a CDRL3 comprising at least or about 95%, 97%, 99%, or 100% homology to SEQ ID NO: 160. In some instances, the antibody or immunoglobulin sequence comprises CDRH1 comprising at least a portion having at least or about 3, 4, 5, 6, 7, 8, 9, 10, 12, 14, 16, or more than 16 amino acids of SEQ ID NO: 155; a CDRH2 comprising at least a portion having at least or about 3, 4, 5, 6, 7, 8, 9, 10, 12, 14, 16, or more than 16 amino acids of SEQ ID NO: 156; a CDRH3 comprising at least a portion having at least or about 3, 4, 5, 6, 7, 8, 9, 10, 12, 14, 16, or more than 16 amino acids of SEQ ID NO: 157; a CDRL1 comprising at least a portion having at least or about 3, 4, 5, 6, 7, 8, 9, 10, 12, 14, 16, or more than 16 amino acids of SEQ ID NO: 158; a CDRL2 comprising at least a portion having at least or about 3, 4, 5, 6, 7, 8, 9, 10, 12, 14, 16, or more than 16 amino acids of SEQ ID NO: 159; and a CDRL3 comprising at least a portion having at least or about 3, 4, 5, 6, 7, 8, 9, 10, 12, 14, 16, or more than 16 amino acids of SEQ ID NO: 160.

[0101] In some embodiments, the antibody or immunoglobulin sequence comprises a CDRH1 comprising at least or about 70%, 80%, 85%, 90%, 91%, 92%, 93%, 94%, 95%, 96%, 97%, 98%, 99%, or 100% sequence identity to SEQ ID NO: 155; a CDRH2 comprising at least or about 70%, 80%, 85%, 90%, 91%, 92%, 93%, 94%, 95%, 96%, 97%, 98%, 99%, or 100% sequence identity to SEQ ID NO: 156; a CDRH3 comprising at least or about 70%, 80%, 85%, 90%, 91%, 92%, 93%, 94%, 95%, 96%, 97%, 98%, 99%, or 100% sequence identity to SEQ ID NO: 157, a CDRL1 comprising at least or about 70%, 80%, 85%, 90%, 91%, 92%, 93%, 94%, 95%, 96%, 97%, 98%, 99%, or 100% sequence identity to SEQ ID NO: 161; a CDRL2 comprising at least or about 70%, 80%, 85%, 90%, 91%, 92%, 93%, 94%, 95%, 96%, 97%, 98%, 99%, or 100% sequence identity to SEQ ID NO: 162; and a CDRL3 comprising at least or about 70%, 80%, 85%, 90%, 91%, 92%, 93%, 94%, 95%, 96%, 97%, 98%, 99%, or 100% sequence identity to SEQ ID NO: 163. In some instances, the antibody or immunoglobulin sequence comprises CDRH1 comprising at least or about 95%, 97%, 99%, or 100% homology to SEQ ID NO: 155; a CDRH2 comprising at least or about 95%, 97%, 99%, or 100% homology to SEQ ID NO: 156; a CDRH3 comprising at least or about 95%, 97%, 99%, or 100% homology to SEQ ID NO: 157; a CDRL1 comprising at least or about 95%, 97%, 99%, or 100% homology to SEQ ID NO: 161; a CDRL2 comprising at least or about 95%, 97%, 99%, or 100% homology to SEQ ID NO: 162; and a CDRL3 comprising at least or about 95%, 97%, 99%, or 100% homology to SEQ ID NO: 163. In some instances, the antibody or immunoglobulin sequence comprises CDRH1 comprising at least a portion having at least or about 3, 4, 5, 6, 7, 8, 9, 10, 12, 14, 16, or more than 16 amino acids of SEQ ID NO: 155; a CDRH2 comprising at least a portion having at least or about 3, 4, 5, 6, 7, 8, 9, 10, 12, 14, 16, or more than 16 amino acids of SEQ ID NO: 156; a CDRH3 comprising at least a portion having at least or about 3, 4, 5, 6, 7, 8, 9, 10, 12, 14, 16, or more than 16 amino acids of SEQ ID NO: 157; a CDRL1 comprising at least a portion having at least or about 3, 4, 5, 6, 7, 8, 9, 10, 12, 14, 16, or more than 16 amino acids of SEQ ID NO: 161; a CDRL2 comprising at least a portion having at least or about 3, 4, 5, 6, 7, 8, 9, 10, 12, 14, 16, or more than 16 amino acids of SEQ ID NO: 162; and a CDRL3 comprising at least a portion having at least or about 3, 4, 5, 6, 7, 8, 9, 10, 12, 14, 16, or more than 16 amino acids of SEQ ID NO: 163.

[0102] Described herein, in some embodiments, are antibodies or immunoglobulins that bind to the CRTH2R. In some instances, the CRTH2R antibody or immunoglobulin sequence comprises a heavy chain variable domain comprising at least or about 70%, 80%, 85%, 90%, 91%, 92%, 93%, 94%, 95%, 96%, 97%, 98%, 99%, or 100% sequence identity to any one of SEQ ID NOs: 1-23 or 126-148. In some instances, the CRTH2R antibody or immunoglobulin sequence comprises a heavy chain variable domain comprising at least or about 95% sequence identity to any one of SEQ ID NOs: 1-23 or 126-148. In some instances, the CRTH2R antibody or immunoglobulin sequence comprises a heavy chain variable domain comprising at least or about 97% sequence identity to any one of SEQ ID NOs: 1-23 or 126-148. In some instances, the CRTH2R antibody or immunoglobulin sequence comprises a heavy chain variable domain comprising at least or about 99% sequence identity to any one of SEQ ID NOs: 1-23 or 126-148. In some instances, the CRTH2R antibody or immunoglobulin sequence comprises a heavy chain variable domain comprising at least or about 100% sequence identity to any one of SEQ ID NOs: 1-23 or 126-148. In some instances, the CRTH2R antibody or immunoglobulin sequence comprises a heavy chain variable domain comprising at least a portion having at least or about 1, 2, 3, 4, 5, 6, 7, 8, 9, 10, 12, 14, 16, 18, 20, 30, 40, 50, 60, 70, 80, 90, 100, 110, 120, 130, 140, 150, 160, 170, 180, 190, 200, 210, 220, 230, 240, 250, 260, 270, 280, 290, 300, 310, 320, 330, 340, 350, 360, 370, 380, 390, 400, or more than 400 amino acids of SEQ ID NOs: 1-23 or 126-148.

[0103] In some instances, the CRTH2R antibody or immunoglobulin sequence comprises a light chain variable domain comprising at least or about 70%, 80%, 85%, 90%, 91%, 92%, 93%, 94%, 95%, 96%, 97%, 98%, 99%, or 100% sequence identity to any one of SEQ ID NOs: 24-45 or 149-151. In some instances, the CRTH2R antibody or immunoglobulin sequence comprises a light chain variable domain comprising at least or about 95% sequence identity to any one of SEQ ID NOs: 24-45 or 149-151. In some instances, the CRTH2R antibody or immunoglobulin sequence comprises a light chain variable domain comprising at least or about 97% sequence identity to any one of SEQ ID NOs: 24-45 or 149-151. In some instances, the CRTH2R antibody or immunoglobulin sequence comprises a light chain variable domain comprising at least or about 99% sequence identity to any one of SEQ ID NOs: 24-45 or 149-151. In some instances, the CRTH2R antibody or immunoglobulin sequence comprises a light chain variable domain comprising at least or about 100% sequence identity to any one of SEQ ID NOs: 24-45 or 149-151. In some instances, the CRTH2R antibody or immunoglobulin sequence comprises a light chain variable domain comprising at least a portion having at least or about 1, 2, 3, 4, 5, 6, 7, 8, 9, 10, 12, 14, 16, 18, 20, 30, 40, 50, 60, 70, 80, 90, 100, 110, 120, 130, 140, 150, 160, 170, 180, 190, 200, 210, 220, 230, 240, 250, 260, 270, 280, 290, 300, 310, 320, 330, 340, 350, 360, 370, 380, 390, 400, or more than 400 amino acids of SEQ ID NOs: 24-45 or 149-151.

[0104] Provided herein are antibodies or immunoglobulins for various protein targets. In some instances, the protein is TIGIT. Described herein, in some embodiments, are antibodies or immunoglobulins that bind to the TIGIT. In some instances, the TIGIT antibody or immunoglobulin sequence comprises a heavy chain variable domain comprising at least or about 70%, 80%, 85%, 90%, 91%, 92%, 93%, 94%, 95%, 96%, 97%, 98%, 99%, or 100% sequence identity to any one of SEQ ID NOs: 84-100. In some instances, the TIGIT antibody or immunoglobulin sequence comprises a heavy chain variable domain comprising at least or about 95% sequence identity to any one of SEQ ID NOs: 84-100. In some instances, the TIGIT antibody or immunoglobulin sequence comprises a heavy chain variable domain comprising at least or about 97% sequence identity to any one of SEQ ID NOs: 84-100. In some instances, the TIGIT antibody or immunoglobulin sequence comprises a heavy chain variable domain comprising at least or about 99% sequence identity to any one of SEQ ID NOs: 84-100. In some instances, the TIGIT antibody or immunoglobulin sequence comprises a heavy chain variable domain comprising at least or about 100% sequence identity to any one of SEQ ID NOs: 84-100. In some instances, the TIGIT antibody or immunoglobulin sequence comprises a heavy chain variable domain comprising at least a portion having at least or about 1, 2, 3, 4, 5, 6, 7, 8, 9, 10, 12, 14, 16, 18, 20, 30, 40, 50, 60, 70, 80, 90, 100, 110, 120, 130, 140, 150, 160, 170, 180, 190, 200, 210, 220, 230, 240, 250, 260, 270, 280, 290, 300, 310, 320, 330, 340, 350, 360, 370, 380, 390, 400, or more than 400 amino acids of any one of SEQ ID NOs: 84-100.

[0105] In some instances, the TIGIT antibody or immunoglobulin sequence comprises a light chain variable domain comprising at least or about 70%, 80%, 85%, 90%, 91%, 92%, 93%, 94%, 95%, 96%, 97%, 98%, 99%, or 100% sequence identity to any one of SEQ ID NOs: 101-117. In some instances, the TIGIT antibody or immunoglobulin sequence comprises a light chain variable domain comprising at least or about 95% sequence identity to any one of SEQ ID NOs: 101-117.

[0106] In some instances, the TIGIT antibody or immunoglobulin sequence comprises a light chain variable domain comprising at least or about 97% sequence identity to any one of SEQ ID NOs: 101-117. In some instances, the TIGIT antibody or immunoglobulin sequence comprises a light chain variable domain comprising at least or about 99% sequence identity to any one of SEQ ID NOs: 101-117. In some instances, the TIGIT antibody or immunoglobulin sequence comprises a light chain variable domain comprising at least or about 100% sequence identity to any one of SEQ ID NOs: 101-117. In some instances, the TIGIT antibody or immunoglobulin sequence comprises a light chain variable domain comprising at least a portion having at least or about 1, 2, 3, 4, 5, 6, 7, 8, 9, 10, 12, 14, 16, 18, 20, 30, 40, 50, 60, 70, 80, 90, 100, 110, 120, 130, 140, 150, 160, 170, 180, 190, 200, 210, 220, 230, 240, 250, 260, 270, 280, 290, 300, 310, 320, 330, 340, 350, 360, 370, 380, 390, 400, or more than 400 amino acids of any one of SEQ ID NOs: 101-117.

[0107] In some instances, the protein is CD3 epsilon. Described herein, in some embodiments, are antibodies or immunoglobulins that bind to the CD3. In some instances, the CD3 antibody or immunoglobulin sequence comprises a heavy chain variable domain comprising at least or about 70%, 80%, 85%, 90%, 91%, 92%, 93%, 94%, 95%, 96%, 97%, 98%, 99%, or 100% sequence identity to any one of SEQ ID NOs: 138-141. In some instances, the CD3 antibody or immunoglobulin sequence comprises a heavy chain variable domain comprising at least or about 95% sequence identity to any one of SEQ ID NOs: 138-141. In some instances, the CD3 antibody or immunoglobulin sequence comprises a heavy chain variable domain comprising at least or about 97% sequence identity to any one of SEQ ID NOs: 138-141. In some instances, the CD3 antibody or immunoglobulin sequence comprises a heavy chain variable domain comprising at least or about 99% sequence identity to any one of SEQ ID NOs: 138-141. In some instances, the CD3 antibody or immunoglobulin sequence comprises a heavy chain variable domain comprising at least or about 100% sequence identity to any one of SEQ ID NOs: 138-141. In some instances, the CD3 antibody or immunoglobulin sequence comprises a heavy chain variable domain comprising at least a portion having at least or about 1, 2, 3, 4, 5, 6, 7, 8, 9, 10, 12, 14, 16, 18, 20, 30, 40, 50, 60, 70, 80, 90, 100, 110, 120, 130, 140, 150, 160, 170, 180, 190, 200, 210, 220, 230, 240, 250, 260, 270, 280, 290, 300, 310, 320, 330, 340, 350, 360, 370, 380, 390, 400, or more than 400 amino acids of any one of SEQ ID NOs: 138-141.

[0108] In some instances, the CD3 antibody or immunoglobulin sequence comprises a light chain variable domain comprising at least or about 70%, 80%, 85%, 90%, 91%, 92%, 93%, 94%, 95%, 96%, 97%, 98%, 99%, or 100% sequence identity to any one of SEQ ID NOs: 142-145. In some instances, the CD3 antibody or immunoglobulin sequence comprises a light chain variable domain comprising at least or about 95% sequence identity to any one of SEQ ID NOs: 142-145. In some instances, the CD3 antibody or immunoglobulin sequence comprises a light chain variable domain comprising at least or about 97% sequence identity to any one of SEQ ID NOs: 142-145. In some instances, the CD3 antibody or immunoglobulin sequence comprises a light chain variable domain comprising at least or about 99% sequence identity to any one of SEQ ID NOs: 142-145. In some instances, the CD3 antibody or immunoglobulin sequence comprises a light chain variable domain comprising at least or about 100% sequence identity to any one of SEQ ID NOs: 142-145. In some instances, the CD3 antibody or immunoglobulin sequence comprises a light chain variable domain comprising at least a portion having at least or about 1, 2, 3, 4, 5, 6, 7, 8, 9, 10, 12, 14, 16, 18, 20, 30, 40, 50, 60, 70, 80, 90, 100, 110, 120, 130, 140, 150, 160, 170, 180, 190, 200, 210, 220, 230, 240, 250, 260, 270, 280, 290, 300, 310, 320, 330, 340, 350, 360, 370, 380, 390, 400, or more than 400 amino acids of any one of SEQ ID NOs: 142-145.

### Variant Libraries

### Codon Variation

[0109] Variant nucleic acid libraries described herein may comprise a plurality of nucleic acids, wherein each nucleic acid encodes for a variant codon sequence compared to a reference nucleic acid sequence. In some instances, each nucleic acid of a first nucleic acid population contains a variant at a single variant site. In some instances, the first nucleic acid population contains a plurality of variants at a single variant site such that the first nucleic acid population contains more than one variant at the same variant site. The first nucleic acid population may comprise nucleic acids collectively encoding multiple codon variants at the same variant site. The first nucleic acid population may comprise nucleic acids collectively encoding up to 19 or more codons at the same position. The first nucleic acid population may comprise nucleic acids collectively encoding up to 60 variant triplets at the same position, or the first nucleic acid population may comprise nucleic acids collectively encoding up to 61 different triplets of codons at the same position. Each variant may encode for a codon that results in a different amino acid during translation. Table 1B provides a listing of each codon possible (and the representative amino acid) for a variant site.

TABLE 1B
List of codons and amino acids

| | One | Three | | | | | | |
|---|---|---|---|---|---|---|---|---|
| | letter | letter | | | | | | |
| Amino Acids | code | code | Codons | | | | | |
| Alanine | A | Ala | GCA | GCC | GCG | GCT | | |
| Cysteine | C | Cys | TGC | TGT | | | | |
| Aspartic acid | D | Asp | GAC | GAT | | | | |
| Glutamic acid | E | Glu | GAA | GAG | | | | |
| Phenylalanine | F | Phe | TTC | TTT | | | | |
| Glycine | G | Gly | GGA | GGC | GGG | GGT | | |
| Histidine | H | His | CAC | CAT | | | | |
| Isoleucine | I | Iso | ATA | ATC | ATT | | | |
| Lysine | K | Lys | AAA | AAG | | | | |
| Leucine | L | Leu | TTA | TTG | CTA | CTC | CTG | CTT |
| Methionine | M | Met | ATG | | | | | |
| Asparagine | N | Asn | AAC | AAT | | | | |
| Proline | P | Pro | CCA | CCC | CCG | CCT | | |
| Glutamine | Q | Gln | CAA | CAG | | | | |
| Arginine | R | Arg | AGA | AGG | CGA | CGC | CGG | CGT |
| Serine | S | Ser | AGC | AGT | TCA | TCC | TCG | TCT |

| | | | | | | |
|---|---|---|---|---|---|---|
| Threonine | T | Thr | ACA | ACC | ACG | ACT |
| Valine | V | Val | GTA | GTC | GTG | GTT |

| Tryptophan | W | Trp | TGG | |
|---|---|---|---|---|
| Tyrosine | Y | Tyr | TAC | TAT |

[0110] A nucleic acid population may comprise varied nucleic acids collectively encoding up to 20 codon variations at multiple positions. In such cases, each nucleic acid in the population comprises variation for codons at more than one position in the same nucleic acid. In some instances, each nucleic acid in the population comprises variation for codons at 1, 2, 3, 4, 5, 6, 7, 8, 9, 10, 11, 12, 13, 14, 15, 16, 17, 18, 19, 20 or more codons in a single nucleic acid. In some instances, each variant long nucleic acid comprises variation for codons at 1, 2, 3, 4, 5, 6, 7, 8, 9, 10, 11, 12, 13, 14, 15, 16, 17, 18, 19, 20, 21, 22, 23, 24, 25, 26, 27, 28, 29, 30 or more codons in a single long nucleic acid. In some instances, the variant nucleic acid population comprises variation for codons at 1, 2, 3, 4, 5, 6, 7, 8, 9, 10, 11, 12, 13, 14, 15, 16, 17, 18, 19, 20, 21, 22, 23, 24, 25, 26, 27, 28, 29, 30 or more codons in a single nucleic acid. In some instances, the variant nucleic acid population comprises variation for codons in at least about 10, 20, 30, 40, 50, 60, 70, 80, 90, 100 or more codons in a single long nucleic acid.

### Highly Parallel Nucleic Acid Synthesis

[0111] Provided herein is a platform approach utilizing miniaturization, parallelization, and vertical integration of the end-to-end process from polynucleotide synthesis to gene assembly within nanowells on silicon to create a revolutionary synthesis platform. Devices described herein provide, with the same footprint as a 96-well plate, a silicon synthesis platform is capable of increasing throughput by a factor of up to 1,000 or more compared to traditional synthesis methods, with production of up to approximately 1,000,000 or more polynucleotides, or 10,000 or more genes in a single highly-parallelized run.

[0112] With the advent of next-generation sequencing, high resolution genomic data has become an important factor for studies that delve into the biological roles of various genes in both normal biology and disease pathogenesis. At the core of this research is the central dogma of molecular biology and the concept of “residue-by-residue transfer of sequential information.” Genomic information encoded in the DNA is transcribed into a message that is then translated into the protein that is the active product within a given biological pathway.

[0113] Another exciting area of study is on the discovery, development and manufacturing of therapeutic molecules focused on a highly-specific cellular target. High diversity DNA sequence libraries are at the core of development pipelines for targeted therapeutics. Gene mutants are used to express proteins in a design, build, and test protein engineering cycle that ideally culminates in an optimized gene for high expression of a protein with high affinity for its therapeutic target. As an example, consider the binding pocket of a receptor. The ability to test all sequence permutations of all residues within the binding pocket simultaneously will allow for a thorough exploration, increasing chances of success. Saturation mutagenesis, in which a researcher attempts to generate all possible mutations at a specific site within the receptor, represents one approach to this development challenge. Though costly and time and labor-intensive, it enables each variant to be introduced into each position. In contrast, combinatorial mutagenesis, where a few selected positions or short stretch of DNA may be modified extensively, generates an incomplete repertoire of variants with biased representation.

[0114] To accelerate the drug development pipeline, a library with the desired variants available at the intended frequency in the right position available for testing-in other words, a precision library, enables reduced costs as well as turnaround time for screening. Provided herein are methods for synthesizing nucleic acid synthetic variant libraries which provide for precise introduction of each intended variant at the desired frequency. To the end user, this translates to the ability to not only thoroughly sample sequence space but also be able to query these hypotheses in an efficient manner, reducing cost and screening time. Genome-wide editing can elucidate important pathways, libraries where each variant and sequence permutation can be tested for optimal functionality, and thousands of genes can be used to reconstruct entire pathways and genomes to re-engineer biological systems for drug discovery.

[0115] In a first example, a drug itself can be optimized using methods described herein. For example, to improve a specified function of an antibody, a variant polynucleotide library encoding for a portion of the antibody is designed and synthesized. A variant nucleic acid library for the antibody can then be generated by processes described herein (e.g., PCR mutagenesis followed by insertion into a vector). The antibody is then expressed in a production cell line and screened for enhanced activity. Example screens include examining modulation in binding affinity to an antigen, stability, or effector function (e.g., ADCC, complement, or apoptosis). Exemplary regions to optimize the antibody include, without limitation, the Fc region, Fab region, variable region of the Fab region, constant region of the Fab region, variable domain of the heavy chain or light chain (VII or VI.), and specific complementarity-determining regions (CDRs) of Vn or VI . . .

[0116] Nucleic acid libraries synthesized by methods described herein may be expressed in various cells associated with a disease state. Cells associated with a disease state include cell lines, tissue samples, primary cells from a subject, cultured cells expanded from a subject, or cells in a model system. Exemplary model systems include, without limitation, plant and animal models of a disease state.

[0117] To identify a variant molecule associated with prevention, reduction or treatment of a disease state, a variant nucleic acid library described herein is expressed in a cell associated with a disease state, or one in which a cell a disease state can be induced. In some instances, an agent is used to induce a disease state in cells. Exemplary tools for disease state induction include, without limitation, a Cre/Lox recombination system, LPS inflammation induction, and streptozotocin to induce hypoglycemia. The cells associated with a disease state may be cells from a model system or cultured cells, as well as cells from a subject having a particular disease condition. Exemplary disease conditions include a bacterial, fungal, viral, autoimmune, or proliferative disorder (e.g., cancer). In some instances, the variant nucleic acid library is expressed in the model system, cell line, or primary cells derived from a subject, and screened for changes in at least one cellular activity. Exemplary cellular activities include, without limitation, proliferation, cycle progression, cell death, adhesion, migration, reproduction, cell signaling, energy production, oxygen utilization, metabolic activity, and aging, response to free radical damage, or any combination thereof.

### Substrates

[0118] Devices used as a surface for polynucleotide synthesis may be in the form of substrates which include, without limitation, homogenous array surfaces, patterned array surfaces, channels, beads, gels, and the like. Provided herein are substrates comprising a plurality of clusters, wherein each cluster comprises a plurality of loci that support the attachment and synthesis of polynucleotides. In some instances, substrates comprise a homogenous array surface. For example, the homogenous array surface is a homogenous plate. The term “locus” as used herein refers to a discrete region on a structure which provides support for polynucleotides encoding for a single predetermined sequence to extend from the surface. In some instances, a locus is on a two dimensional surface, e.g., a substantially planar surface. In some instances, a locus is on a three-dimensional surface, e.g., a well, microwell, channel, or post. In some instances, a surface of a locus comprises a material that is actively functionalized to attach to at least one nucleotide for polynucleotide synthesis, or preferably, a population of identical nucleotides for synthesis of a population of polynucleotides. In some instances, polynucleotide refers to a population of polynucleotides encoding for the same nucleic acid sequence. In some cases, a surface of a substrate is inclusive of one or a plurality of surfaces of a substrate. The average error rates for polynucleotides synthesized within a library described here using the systems and methods provided are often less than 1 in 1000, less than about 1 in 2000, less than about 1 in 3000 or less often without error correction.

[0119] Provided herein are surfaces that support the parallel synthesis of a plurality of polynucleotides having different predetermined sequences at addressable locations on a common support. In some instances, a substrate provides support for the synthesis of more than 50, 100, 200, 400, 600, 800, 1000, 1200, 1400, 1600, 1800, 2,000; 5,000; 10,000; 20,000; 50,000; 100,000; 200,000; 300,000; 400,000; 500,000; 600,000; 700,000; 800,000; 900,000; 1,000,000; 1,200,000; 1,400,000; 1,600,000; 1,800,000; 2,000,000; 2,500,000; 3,000,000; 3,500,000; 4,000,000; 4,500,000; 5,000,000; 10,000,000 or more non-identical polynucleotides. In some cases, the surfaces provide support for the synthesis of more than 50, 100, 200, 400, 600, 800, 1000, 1200, 1400, 1600, 1800, 2,000; 5,000; 10,000; 20,000; 50,000; 100,000; 200,000; 300,000; 400,000; 500,000; 600,000; 700,000; 800,000; 900,000; 1,000,000; 1,200,000; 1,400,000; 1,600,000; 1,800,000; 2,000,000; 2,500,000; 3,000,000; 3,500,000; 4,000,000; 4,500,000; 5,000,000; 10,000,000 or more polynucleotides encoding for distinct sequences. In some instances, at least a portion of the polynucleotides have an identical sequence or are configured to be synthesized with an identical sequence. In some instances, the substrate provides a surface environment for the growth of polynucleotides having at least 80, 90, 100, 120, 150, 175, 200, 225, 250, 275, 300, 325, 350, 375, 400, 425, 450, 475, 500 bases or more.

[0120] Provided herein are methods for polynucleotide synthesis on distinct loci of a substrate, wherein each locus supports the synthesis of a population of polynucleotides. In some cases, each locus supports the synthesis of a population of polynucleotides having a different sequence than a population of polynucleotides grown on another locus. In some instances, each polynucleotide sequence is synthesized with 1, 2, 3, 4, 5, 6, 7, 8, 9 or more redundancy across different loci within the same cluster of loci on a surface for polynucleotide synthesis. In some instances, the loci of a substrate are located within a plurality of clusters. In some instances, a substrate comprises at least 10, 500, 1000, 2000, 3000, 4000, 5000, 6000, 7000, 8000, 9000, 10000, 11000, 12000, 13000, 14000, 15000, 20000, 30000, 40000, 50000 or more clusters. In some instances, a substrate comprises more than 2,000; 5,000; 10,000; 100,000; 200,000; 300,000; 400,000; 500,000; 600,000; 700,000; 800,000; 900,000; 1,000,000; 1,100,000; 1,200,000; 1,300,000; 1,400,000; 1,500,000; 1,600,000; 1,700,000; 1,800,000; 1,900,000; 2,000,000; 300,000; 400,000; 500,000; 600,000; 700,000; 800,000; 900,000; 1,000,000; 1,200,000; 1,400,000; 1,600,000; 1,800,000; 2,000,000; 2,500,000; 3,000,000; 3,500,000; 4,000,000; 4,500,000; 5,000,000; or 10,000,000 or more distinct loci. In some instances, a substrate comprises about 10,000 distinct loci. The amount of loci within a single cluster is varied in different instances. In some cases, each cluster includes 1, 2, 3, 4, 5, 6, 7, 8, 9, 10, 20, 30, 40, 50, 60, 70, 80, 90, 100, 120, 130, 150, 200, 300, 400, 500 or more loci. In some instances, each cluster includes about 50-500 loci. In some instances, each cluster includes about 100-200 loci. In some instances, each cluster includes about 100-150 loci. In some instances, each cluster includes about 109, 121, 130 or 137 loci. In some instances, each cluster includes about 19, 20, 61, 64 or more loci. Alternatively or in combination, polynucleotide synthesis occurs on a homogenous array surface.

[0121] In some instances, the number of distinct polynucleotides synthesized on a substrate is dependent on the number of distinct loci available in the substrate. In some instances, the density of loci within a cluster or surface of a substrate is at least or about 1, 10, 25, 50, 65, 75, 100, 130, 150, 175, 200, 300, 400, 500, 1,000 or more loci per mm². In some cases, a substrate comprises 10-500, 25-400, 50-500, 100-500, 150-500, 10-250, 50-250, 10-200, or 50-200 mm². In some instances, the distance between the centers of two adjacent loci within a cluster or surface is from about 10-500, from about 10-200, or from about 10-100 μm. In some instances, the distance between two centers of adjacent loci is greater than about 10, 20, 30, 40, 50, 60, 70, 80, 90 or 100 μm. In some instances, the distance between the centers of two adjacent loci is less than about 200, 150, 100, 80, 70, 60, 50, 40, 30, 20 or 10 μm. In some instances, each locus has a width of about 0.5, 1, 2, 3, 4, 5, 6, 7, 8, 9, 10, 20, 30, 40, 50, 60, 70, 80, 90 or 100 μm. In some cases, each locus has a width of about 0.5-100, 0.5-50, 10-75, or 0.5-50 μm.

[0122] In some instances, the density of clusters within a substrate is at least or about 1 cluster per 100 mm², 1 cluster per 10 mm², 1 cluster per 5 mm², 1 cluster per 4 mm², 1 cluster per 3 mm², 1 cluster per 2 mm², 1 cluster per 1 mm², 2 clusters per 1 mm², 3 clusters per 1 mm², 4 clusters per 1 mm², 5 clusters per 1 mm², 10 clusters per 1 mm², 50 clusters per 1 mm² or more. In some instances, a substrate comprises from about 1 cluster per 10 mm² to about 10 clusters per 1 mm². In some instances, the distance between the centers of two adjacent clusters is at least or about 50, 100, 200, 500, 1000, 2000, or 5000 μm. In some cases, the distance between the centers of two adjacent clusters is between about 50-100, 50-200, 50-300, 50-500, and 100-2000 μm. In some cases, the distance between the centers of two adjacent clusters is between about 0.05-50, 0.05-10, 0.05-5, 0.05-4, 0.05-3, 0.05-2, 0.1-10, 0.2-10, 0.3-10, 0.4-10, 0.5-10, 0.5-5, or 0.5-2 mm. In some cases, each cluster has a cross section of about 0.5 to about 2, about 0.5 to about 1, or about 1 to about 2 mm. In some cases, each cluster has a cross section of about 0.5, 0.6, 0.7, 0.8, 0.9, 1, 1.1, 1.2, 1.3, 1.4, 1.5, 1.6, 1.7, 1.8, 1.9 or 2 mm. In some cases, each cluster has an interior cross section of about 0.5, 0.6, 0.7, 0.8, 0.9, 1, 1.1, 1.15, 1.2, 1.3, 1.4, 1.5, 1.6, 1.7, 1.8, 1.9 or 2 mm.

[0123] In some instances, a substrate is about the size of a standard 96 well plate, for example between about 100 and about 200 mm by between about 50 and about 150 mm. In some instances, a substrate has a diameter less than or equal to about 1000, 500, 450, 400, 300, 250, 200, 150, 100 or 50 mm. In some instances, the diameter of a substrate is between about 25-1000, 25-800, 25-600, 25-500, 25-400, 25-300, or 25-200 mm. In some instances, a substrate has a planar surface area of at least about 100; 200; 500; 1,000; 2,000; 5,000; 10,000; 12,000; 15,000; 20,000; 30,000; 40,000; 50,000 mm² or more. In some instances, the thickness of a substrate is between about 50-2000, 50-1000, 100-1000, 200-1000, or 250-1000 mm.

### Surface materials

[0124] Substrates, devices, and reactors provided herein are fabricated from any variety of materials suitable for the methods, compositions, and systems described herein. In certain instances, substrate materials are fabricated to exhibit a low level of nucleotide binding. In some instances, substrate materials are modified to generate distinct surfaces that exhibit a high level of nucleotide binding. In some instances, substrate materials are transparent to visible and/or UV light. In some instances, substrate materials are sufficiently conductive, e.g., are able to form uniform electric fields across all or a portion of a substrate. In some instances, conductive materials are connected to an electric ground. In some instances, the substrate is heat conductive or insulated. In some instances, the materials are chemical resistant and heat resistant to support chemical or biochemical reactions, for example polynucleotide synthesis reaction processes. In some instances, a substrate comprises flexible materials. For flexible materials, materials can include, without limitation: nylon, both modified and unmodified, nitrocellulose, polypropylene, and the like. In some instances, a substrate comprises rigid materials. For rigid materials, materials can include, without limitation: glass; fuse silica; silicon, plastics (for example polytetraflouroethylene, polypropylene, polystyrene, polycarbonate, and blends thereof, and the like); metals (for example, gold, platinum, and the like). The substrate, solid support or reactors can be fabricated from a material selected from the group consisting of silicon, polystyrene, agarose, dextran, cellulosic polymers, polyacrylamides, polydimethylsiloxane (PDMS), and glass. The substrates/solid supports or the microstructures, reactors therein may be manufactured with a combination of materials listed herein or any other suitable material known in the art.

### Surface Architecture

[0125] Provided herein are substrates for the methods, compositions, and systems described herein, wherein the substrates have a surface architecture suitable for the methods, compositions, and systems described herein. In some instances, a substrate comprises raised and/or lowered features. One benefit of having such features is an increase in surface area to support polynucleotide synthesis. In some instances, a substrate having raised and/or lowered features is referred to as a three-dimensional substrate. In some cases, a three-dimensional substrate comprises one or more channels. In some cases, one or more loci comprise a channel. In some cases, the channels are accessible to reagent deposition via a deposition device such as a material deposition device. In some cases, reagents and/or fluids collect in a larger well in fluid communication one or more channels. For example, a substrate comprises a plurality of channels corresponding to a plurality of loci with a cluster, and the plurality of channels are in fluid communication with one well of the cluster. In some methods, a library of polynucleotides is synthesized in a plurality of loci of a cluster.

[0126] Provided herein are substrates for the methods, compositions, and systems described herein, wherein the substrates are configured for polynucleotide synthesis. In some instances, the structure is configured to allow for controlled flow and mass transfer paths for polynucleotide synthesis on a surface. In some instances, the configuration of a substrate allows for the controlled and even distribution of mass transfer paths, chemical exposure times, and/or wash efficacy during polynucleotide synthesis. In some instances, the configuration of a substrate allows for increased sweep efficiency, for example by providing sufficient volume for a growing polynucleotide such that the excluded volume by the growing polynucleotide does not take up more than 50, 45, 40, 35, 30, 25, 20, 15, 14, 13, 12, 11, 10, 9, 8, 7, 6, 5, 4, 3, 2, 1%, or less of the initially available volume that is available or suitable for growing the polynucleotide. In some instances, a three-dimensional structure allows for managed flow of fluid to allow for the rapid exchange of chemical exposure.

[0127] Provided herein are substrates for the methods, compositions, and systems described herein, wherein the substrates comprise structures suitable for the methods, compositions, and systems described herein. In some instances, segregation is achieved by physical structure. In some instances, segregation is achieved by differential functionalization of the surface generating active and passive regions for polynucleotide synthesis. In some instances, differential functionalization is achieved by alternating the hydrophobicity across the substrate surface, thereby creating water contact angle effects that cause beading or wetting of the deposited reagents. Employing larger structures can decrease splashing and cross-contamination of distinct polynucleotide synthesis locations with reagents of the neighboring spots. In some cases, a device, such as a material deposition device, is used to deposit reagents to distinct polynucleotide synthesis locations. Substrates having three-dimensional features are configured in a manner that allows for the synthesis of a large number of polynucleotides (e.g., more than about 10,000) with a low error rate (e.g., less than about 1:500, 1:1000, 1:1500, 1:2,000, 1:3,000, 1:5,000, or 1:10,000). In some cases, a substrate comprises features with a density of about or greater than about 1, 5, 10, 20, 30, 40, 50, 60, 70, 80, 100, 110, 120, 130, 140, 150, 160, 170, 180, 190, 200, 300, 400 or 500 features per mm².

[0128] A well of a substrate may have the same or different width, height, and/or volume as another well of the substrate. A channel of a substrate may have the same or different width, height, and/or volume as another channel of the substrate. In some instances, the diameter of a cluster or the diameter of a well comprising a cluster, or both, is between about 0.05-50, 0.05-10, 0.05-5, 0.05-4, 0.05-3, 0.05-2, 0.05-1, 0.05-0.5, 0.05-0.1, 0.1-10, 0.2-10, 0.3-10, 0.4-10, 0.5-10, 0.5-5, or 0.5-2 mm. In some instances, the diameter of a cluster or well or both is less than or about 5, 4, 3, 2, 1, 0.5, 0.1, 0.09, 0.08, 0.07, 0.06, or 0.05 mm. In some instances, the diameter of a cluster or well or both is between about 1.0 and 1.3 mm. In some instances, the diameter of a cluster or well, or both is about 1.150 mm. In some instances, the diameter of a cluster or well, or both is about 0.08 mm. The diameter of a cluster refers to clusters within a two-dimensional or three-dimensional substrate.

[0129] In some instances, the height of a well is from about 20-1000, 50-1000, 100-1000, 200-1000, 300-1000, 400-1000, or 500-1000 μm. In some cases, the height of a well is less than about 1000, 900, 800, 700, or 600 μm.

[0130] In some instances, a substrate comprises a plurality of channels corresponding to a plurality of loci within a cluster, wherein the height or depth of a channel is 5-500, 5-400, 5-300, 5-200, 5-100, 5-50, or 10-50 μm. In some cases, the height of a channel is less than 100, 80, 60, 40, or 20 μm.

[0131] In some instances, the diameter of a channel, locus (e.g., in a substantially planar substrate) or both channel and locus (e.g., in a three-dimensional substrate wherein a locus corresponds to a channel) is from about 1-1000, 1-500, 1-200, 1-100, 5-100, or 10-100 μm, for example, about 90, 80, 70, 60, 50, 40, 30, 20 or 10 μm. In some instances, the diameter of a channel, locus, or both channel and locus is less than about 100, 90, 80, 70, 60, 50, 40, 30, 20 or 10 μm. In some instances, the distance between the center of two adjacent channels, loci, or channels and loci is from about 1-500, 1-200, 1-100, 5-200, 5-100, 5-50, or 5-30, for example, about 20 μm.

### Surface Modifications

[0132] Provided herein are methods for polynucleotide synthesis on a surface, wherein the surface comprises various surface modifications. In some instances, the surface modifications are employed for the chemical and/or physical alteration of a surface by an additive or subtractive process to change one or more chemical and/or physical properties of a substrate surface or a selected site or region of a substrate surface. For example, surface modifications include, without limitation, (1) changing the wetting properties of a surface, (2) functionalizing a surface, i.e., providing, modifying or substituting surface functional groups, (3) defunctionalizing a surface, i.e., removing surface functional groups, (4) otherwise altering the chemical composition of a surface, e.g., through etching, (5) increasing or decreasing surface roughness, (6) providing a coating on a surface, e.g., a coating that exhibits wetting properties that are different from the wetting properties of the surface, and/or (7) depositing particulates on a surface.

[0133] In some cases, the addition of a chemical layer on top of a surface (referred to as adhesion promoter) facilitates structured patterning of loci on a surface of a substrate. Exemplary surfaces for application of adhesion promotion include, without limitation, glass, silicon, silicon dioxide and silicon nitride. In some cases, the adhesion promoter is a chemical with a high surface energy. In some instances, a second chemical layer is deposited on a surface of a substrate. In some cases, the second chemical layer has a low surface energy. In some cases, surface energy of a chemical layer coated on a surface supports localization of droplets on the surface. Depending on the patterning arrangement selected, the proximity of loci and/or area of fluid contact at the loci are alterable.

[0134] In some instances, a substrate surface, or resolved loci, onto which nucleic acids or other moieties are deposited, e.g., for polynucleotide synthesis, are smooth or substantially planar (e.g., two-dimensional) or have irregularities, such as raised or lowered features (e.g., three-dimensional features). In some instances, a substrate surface is modified with one or more different layers of compounds. Such modification layers of interest include, without limitation, inorganic and organic layers such as metals, metal oxides, polymers, small organic molecules and the like.

[0135] In some instances, resolved loci of a substrate are functionalized with one or more moieties that increase and/or decrease surface energy. In some cases, a moiety is chemically inert. In some cases, a moiety is configured to support a desired chemical reaction, for example, one or more processes in a polynucleotide synthesis reaction. The surface energy, or hydrophobicity, of a surface is a factor for determining the affinity of a nucleotide to attach onto the surface. In some instances, a method for substrate functionalization comprises: (a) providing a substrate having a surface that comprises silicon dioxide; and (b) silanizing the surface using, a suitable silanizing agent described herein or otherwise known in the art, for example, an organofunctional alkoxysilane molecule. Methods and functionalizing agents are described in U.S. Pat. No. 5,474,796, which is herein incorporated by reference in its entirety.

[0136] In some instances, a substrate surface is functionalized by contact with a derivatizing composition that contains a mixture of silanes, under reaction conditions effective to couple the silanes to the substrate surface, typically via reactive hydrophilic moieties present on the substrate surface. Silanization generally covers a surface through self-assembly with organofunctional alkoxysilane molecules. A variety of siloxane functionalizing reagents can further be used as currently known in the art, e.g., for lowering or increasing surface energy. The organofunctional alkoxysilanes are classified according to their organic functions.

### Polynucleotide Synthesis

[0137] Methods of the current disclosure for polynucleotide synthesis may include processes involving phosphoramidite chemistry. In some instances, polynucleotide synthesis comprises coupling a base with phosphoramidite. Polynucleotide synthesis may comprise coupling a base by deposition of phosphoramidite under coupling conditions, wherein the same base is optionally deposited with phosphoramidite more than once, i.e., double coupling. Polynucleotide synthesis may comprise capping of unreacted sites. In some instances, capping is optional. Polynucleotide synthesis may also comprise oxidation or an oxidation step or oxidation steps. Polynucleotide synthesis may comprise deblocking, detritylation, and sulfurization. In some instances, polynucleotide synthesis comprises either oxidation or sulfurization. In some instances, between one or each step during a polynucleotide synthesis reaction, the device is washed, for example, using tetrazole or acetonitrile. Time frames for any one step in a phosphoramidite synthesis method may be less than about 2 min, 1 min, 50 sec, 40 sec, 30 sec, 20 sec and 10 sec.

[0138] Polynucleotide synthesis using a phosphoramidite method may comprise a subsequent addition of a phosphoramidite building block (e.g., nucleoside phosphoramidite) to a growing polynucleotide chain for the formation of a phosphite triester linkage. Phosphoramidite polynucleotide synthesis proceeds in the 3′ to 5′ direction. Phosphoramidite polynucleotide synthesis allows for the controlled addition of one nucleotide to a growing nucleic acid chain per synthesis cycle. In some instances, each synthesis cycle comprises a coupling step.

[0139] Phosphoramidite coupling involves the formation of a phosphite triester linkage between an activated nucleoside phosphoramidite and a nucleoside bound to the substrate, for example, via a linker. In some instances, the nucleoside phosphoramidite is provided to the device activated. In some instances, the nucleoside phosphoramidite is provided to the device with an activator. In some instances, nucleoside phosphoramidites are provided to the device in a 1.5, 2, 3, 4, 5, 6, 7, 8, 9, 10, 11, 12, 13, 14, 15, 16, 17, 18, 19, 20, 25, 30, 35, 40, 50, 60, 70, 80, 90, 100-fold excess or more over the substrate-bound nucleosides. In some instances, the addition of nucleoside phosphoramidite is performed in an anhydrous environment, for example, in anhydrous acetonitrile. Following addition of a nucleoside phosphoramidite, the device is optionally washed. In some instances, the coupling step is repeated one or more additional times, optionally with a wash step between nucleoside phosphoramidite additions to the substrate. In some instances, a polynucleotide synthesis method used herein comprises 1, 2, 3 or more sequential coupling steps. Prior to coupling, in many cases, the nucleoside bound to the device is de-protected by removal of a protecting group, where the protecting group functions to prevent polymerization. A common protecting group is 4,4′-dimethoxytrityl (DMT).

[0140] Following coupling, phosphoramidite polynucleotide synthesis methods optionally comprise a capping step. In a capping step, the growing polynucleotide is treated with a capping agent. A capping step is useful to block unreacted substrate-bound 5′-OH groups after coupling from further chain elongation, preventing the formation of polynucleotides with internal base deletions. Further, phosphoramidites activated with 1H-tetrazole may react, to a small extent, with the O6 position of guanosine. Without being bound by theory, upon oxidation with I₂/water, this side product, possibly via O6-N7 migration, may undergo depurination. The apurinic sites may end up being cleaved in the course of the final deprotection of the polynucleotide thus reducing the yield of the full-length product. The O6 modifications may be removed by treatment with the capping reagent prior to oxidation with I₂/water. In some instances, inclusion of a capping step during polynucleotide synthesis decreases the error rate as compared to synthesis without capping. As an example, the capping step comprises treating the substrate-bound polynucleotide with a mixture of acetic anhydride and 1-methylimidazole. Following a capping step, the device is optionally washed.

[0141] In some instances, following addition of a nucleoside phosphoramidite, and optionally after capping and one or more wash steps, the device bound growing nucleic acid is oxidized. The oxidation step comprises the phosphite triester is oxidized into a tetracoordinated phosphate triester, a protected precursor of the naturally occurring phosphate diester internucleoside linkage. In some instances, oxidation of the growing polynucleotide is achieved by treatment with iodine and water, optionally in the presence of a weak base (e.g., pyridine, lutidine, collidine). Oxidation may be carried out under anhydrous conditions using, e.g. tert-Butyl hydroperoxide or (1S)-(+)-(10-camphorsulfonyl)-oxaziridine (CSO). In some methods, a capping step is performed following oxidation. A second capping step allows for device drying, as residual water from oxidation that may persist can inhibit subsequent coupling. Following oxidation, the device and growing polynucleotide is optionally washed. In some instances, the step of oxidation is substituted with a sulfurization step to obtain polynucleotide phosphorothioates, wherein any capping steps can be performed after the sulfurization. Many reagents are capable of the efficient sulfur transfer, including but not limited to 3-(Dimethylaminomethylidene) amino)-3H-1,2,4-dithiazole-3-thione, DDTT, 3H-1,2-benzodithiol-3-one 1,1-dioxide, also known as Beaucage reagent, and N,N,N′N′-Tetraethylthiuram disulfide (TETD).

[0142] In order for a subsequent cycle of nucleoside incorporation to occur through coupling, the protected 5′ end of the device bound growing polynucleotide is removed so that the primary hydroxyl group is reactive with a next nucleoside phosphoramidite. In some instances, the protecting group is DMT and deblocking occurs with trichloroacetic acid in dichloromethane. Conducting detritylation for an extended time or with stronger than recommended solutions of acids may lead to increased depurination of solid support-bound polynucleotide and thus reduces the yield of the desired full-length product. Methods and compositions of the disclosure described herein provide for controlled deblocking conditions limiting undesired depurination reactions. In some instances, the device bound polynucleotide is washed after deblocking. In some instances, efficient washing after deblocking contributes to synthesized polynucleotides having a low error rate.

[0143] Methods for the synthesis of polynucleotides typically involve an iterating sequence of the following steps: application of a protected monomer to an actively functionalized surface (e.g., locus) to link with either the activated surface, a linker or with a previously deprotected monomer; deprotection of the applied monomer so that it is reactive with a subsequently applied protected monomer; and application of another protected monomer for linking. One or more intermediate steps include oxidation or sulfurization. In some instances, one or more wash steps precede or follow one or all of the steps.

[0144] Methods for phosphoramidite-based polynucleotide synthesis comprise a series of chemical steps. In some instances, one or more steps of a synthesis method involve reagent cycling, where one or more steps of the method comprise application to the device of a reagent useful for the step. For example, reagents are cycled by a series of liquid deposition and vacuum drying steps. For substrates comprising three-dimensional features such as wells, microwells, channels and the like, reagents are optionally passed through one or more regions of the device via the wells and/or channels.

[0145] Methods and systems described herein relate to polynucleotide synthesis devices for the synthesis of polynucleotides. The synthesis may be in parallel. For example, at least or about at least 2, 3, 4, 5, 6, 7, 8, 9, 10, 11, 12, 13, 14, 15, 16, 17, 18, 19, 20, 21, 22, 23, 24, 25, 30, 35, 40, 45, 50, 100, 150, 200, 250, 300, 350, 400, 450, 500, 550, 600, 650, 700, 750, 800, 850, 900, 1000, 10000, 50000, 75000, 100000 or more polynucleotides can be synthesized in parallel. The total number polynucleotides that may be synthesized in parallel may be from 2-100000, 3-50000, 4-10000, 5-1000, 6-900, 7-850, 8-800, 9-750, 10-700, 11-650, 12-600, 13-550, 14-500, 15-450, 16-400, 17-350, 18-300, 19-250, 20-200, 21-150, 22-100, 23-50, 24-45, 25-40, 30-35. Those of skill in the art appreciate that the total number of polynucleotides synthesized in parallel may fall within any range bound by any of these values, for example 25-100. The total number of polynucleotides synthesized in parallel may fall within any range defined by any of the values serving as endpoints of the range. Total molar mass of polynucleotides synthesized within the device or the molar mass of each of the polynucleotides may be at least or at least about 10, 20, 30, 40, 50, 100, 250, 500, 750, 1000, 2000, 3000, 4000, 5000, 6000, 7000, 8000, 9000, 10000, 25000, 50000, 75000, 100000 picomoles, or more. The length of each of the polynucleotides or average length of the polynucleotides within the device may be at least or about at least 10, 15, 20, 25, 30, 35, 40, 45, 50, 100, 150, 200, 300, 400, 500 nucleotides, or more. The length of each of the polynucleotides or average length of the polynucleotides within the device may be at most or about at most 500, 400, 300, 200, 150, 100, 50, 45, 35, 30, 25, 20, 19, 18, 17, 16, 15, 14, 13, 12, 11, 10 nucleotides, or less. The length of each of the polynucleotides or average length of the polynucleotides within the device may fall from 10-500, 9-400, 11-300, 12-200, 13-150, 14-100, 15-50, 16-45, 17-40, 18-35, 19-25. Those of skill in the art appreciate that the length of each of the polynucleotides or average length of the polynucleotides within the device may fall within any range bound by any of these values, for example 100-300. The length of each of the polynucleotides or average length of the polynucleotides within the device may fall within any range defined by any of the values serving as endpoints of the range.

[0146] Methods for polynucleotide synthesis on a surface provided herein allow for synthesis at a fast rate. As an example, at least 3, 4, 5, 6, 7, 8, 9, 10, 11, 12, 13, 14, 15, 16, 17, 18, 19, 20, 21, 22, 23, 24, 25, 26, 27, 28, 29, 30, 35, 40, 45, 50, 55, 60, 70, 80, 90, 100, 125, 150, 175, 200 nucleotides per hour, or more are synthesized. Nucleotides include adenine, guanine, thymine, cytosine, uridine building blocks, or analogs/modified versions thereof. In some instances, libraries of polynucleotides are synthesized in parallel on substrate. For example, a device comprising about or at least about 100; 1,000; 10,000; 30,000; 75,000; 100,000; 1,000,000; 2,000,000; 3,000,000; 4,000,000; or 5,000,000 resolved loci is able to support the synthesis of at least the same number of distinct polynucleotides, wherein polynucleotide encoding a distinct sequence is synthesized on a resolved locus. In some instances, a library of polynucleotides is synthesized on a device with low error rates described herein in less than about three months, two months, one month, three weeks, 15, 14, 13, 12, 11, 10, 9, 8, 7, 6, 5, 4, 3, 2 days, 24 hours or less. In some instances, larger nucleic acids assembled from a polynucleotide library synthesized with low error rate using the substrates and methods described herein are prepared in less than about three months, two months, one month, three weeks, 15, 14, 13, 12, 11, 10, 9, 8, 7, 6, 5, 4, 3, 2 days, 24 hours or less.

[0147] In some instances, methods described herein provide for generation of a library of nucleic acids comprising variant nucleic acids differing at a plurality of codon sites. In some instances, a nucleic acid may have 1 site, 2 sites, 3 sites, 4 sites, 5 sites, 6 sites, 7 sites, 8 sites, 9 sites, 10 sites, 11 sites, 12 sites, 13 sites, 14 sites, 15 sites, 16 sites, 17 sites 18 sites, 19 sites, 20 sites, 30 sites, 40 sites, 50 sites, or more of variant codon sites.

[0148] In some instances, the one or more sites of variant codon sites may be adjacent. In some instances, the one or more sites of variant codon sites may not be adjacent and separated by 1, 2, 3, 4, 5, 6, 7, 8, 9, 10, or more codons.

[0149] In some instances, a nucleic acid may comprise multiple sites of variant codon sites, wherein all the variant codon sites are adjacent to one another, forming a stretch of variant codon sites. In some instances, a nucleic acid may comprise multiple sites of variant codon sites, wherein none the variant codon sites are adjacent to one another. In some instances, a nucleic acid may comprise multiple sites of variant codon sites, wherein some the variant codon sites are adjacent to one another, forming a stretch of variant codon sites, and some of the variant codon sites are not adjacent to one another.

[0150] Referring to the Figures, FIG. 1 illustrates an exemplary process workflow for synthesis of nucleic acids (e.g., genes) from shorter nucleic acids. The workflow is divided generally into phases: (1) de novo synthesis of a single stranded nucleic acid library, (2) joining nucleic acids to form larger fragments, (3) error correction, (4) quality control, and (5) shipment. Prior to de novo synthesis, an intended nucleic acid sequence or group of nucleic acid sequences is preselected. For example, a group of genes is preselected for generation.

[0151] Once large nucleic acids for generation are selected, a predetermined library of nucleic acids is designed for de novo synthesis. Various suitable methods are known for generating high density polynucleotide arrays. In the workflow example, a device surface layer is provided. In the example, chemistry of the surface is altered in order to improve the polynucleotide synthesis process. Areas of low surface energy are generated to repel liquid while areas of high surface energy are generated to attract liquids. The surface itself may be in the form of a planar surface or contain variations in shape, such as protrusions or microwells which increase surface area. In the workflow example, high surface energy molecules selected serve a dual function of supporting DNA chemistry, as disclosed in International Patent Application Publication WO/2015/021080, which is herein incorporated by reference in its entirety.

[0152] In situ preparation of polynucleotide arrays is generated on a solid support and utilizes single nucleotide extension process to extend multiple oligomers in parallel. A deposition device, such as a material deposition device, is designed to release reagents in a step wise fashion such that multiple polynucleotides extend, in parallel, one residue at a time to generate oligomers with a predetermined nucleic acid sequence 102. In some instances, polynucleotides are cleaved from the surface at this stage. Cleavage includes gas cleavage, e.g., with ammonia or methylamine.

[0153] The generated polynucleotide libraries are placed in a reaction chamber. In this exemplary workflow, the reaction chamber (also referred to as “nanoreactor”) is a silicon coated well, containing PCR reagents and lowered onto the polynucleotide library 103. Prior to or after the sealing 104 of the polynucleotides, a reagent is added to release the polynucleotides from the substrate. In the exemplary workflow, the polynucleotides are released subsequent to sealing of the nanoreactor 105. Once released, fragments of single stranded polynucleotides hybridize in order to span an entire long range sequence of DNA. Partial hybridization 105 is possible because each synthesized polynucleotide is designed to have a small portion overlapping with at least one other polynucleotide in the pool.

[0154] After hybridization, a PCA reaction is commenced. During the polymerase cycles, the polynucleotides anneal to complementary fragments and gaps are filled in by a polymerase. Each cycle increases the length of various fragments randomly depending on which polynucleotides find each other. Complementarity amongst the fragments allows for forming a complete large span of double stranded DNA 106.

[0155] After PCA is complete, the nanoreactor is separated from the device 107 and positioned for interaction with a device having primers for PCR 108. After sealing, the nanoreactor is subject to PCR 109 and the larger nucleic acids are amplified. After PCR 110, the nanochamber is opened 111, error correction reagents are added 112, the chamber is sealed 113 and an error correction reaction occurs to remove mismatched base pairs and/or strands with poor complementarity from the double stranded PCR amplification products 114. The nanoreactor is opened and separated 115. Error corrected product is next subject to additional processing steps, such as PCR and molecular bar coding, and then packaged 122 for shipment 123.

[0156] In some instances, quality control measures are taken. After error correction, quality control steps include for example interaction with a wafer having sequencing primers for amplification of the error corrected product 116, sealing the wafer to a chamber containing error corrected amplification product 117, and performing an additional round of amplification 118. The nanoreactor is opened 119 and the products are pooled 120 and sequenced 121. After an acceptable quality control determination is made, the packaged product 122 is approved for shipment 123.

[0157] In some instances, a nucleic acid generated by a workflow such as that in FIG. 1 is subject to mutagenesis using overlapping primers disclosed herein. In some instances, a library of primers are generated by in situ preparation on a solid support and utilize single nucleotide extension process to extend multiple oligomers in parallel. A deposition device, such as a material deposition device, is designed to release reagents in a step wise fashion such that multiple polynucleotides extend, in parallel, one residue at a time to generate oligomers with a predetermined nucleic acid sequence 102.

### Computer Systems

[0158] Any of the systems described herein, may be operably linked to a computer and may be automated through a computer either locally or remotely. In various instances, the methods and systems of the disclosure may further comprise software programs on computer systems and use thereof. Accordingly, computerized control for the synchronization of the dispense/vacuum/refill functions such as orchestrating and synchronizing the material deposition device movement, dispense action and vacuum actuation are within the bounds of the disclosure. The computer systems may be programmed to interface between the user specified base sequence and the position of a material deposition device to deliver the correct reagents to specified regions of the substrate.

[0159] The computer system 200 illustrated in FIG. 2 may be understood as a logical apparatus that can read instructions from media 211 and/or a network port 205, which can optionally be connected to server 209 having fixed media 212. The system, such as shown in FIG. 2 can include a CPU 201, disk drives 203, optional input devices such as keyboard 215 and/or mouse 216 and optional monitor 207. Data communication can be achieved through the indicated communication medium to a server at a local or a remote location. The communication medium can include any means of transmitting and/or receiving data. For example, the communication medium can be a network connection, a wireless connection or an internet connection. Such a connection can provide for communication over the World Wide Web. It is envisioned that data relating to the present disclosure can be transmitted over such networks or connections for reception and/or review by a party 222 as illustrated in FIG. 2.

[0160] As illustrated in FIG. 3, a high speed cache 304 can be connected to, or incorporated in, the processor 302 to provide a high speed memory for instructions or data that have been recently, or are frequently, used by processor 302. The processor 302 is connected to a north bridge 306 by a processor bus 308. The north bridge 306 is connected to random access memory (RAM) 310 by a memory bus 312 and manages access to the RAM 310 by the processor 302. The north bridge 306 is also connected to a south bridge 314 by a chipset bus 316. The south bridge 314 is, in turn, connected to a peripheral bus 318. The peripheral bus can be, for example, PCI, PCI-X, PCI Express, or other peripheral bus. The north bridge and south bridge are often referred to as a processor chipset and manage data transfer between the processor, RAM, and peripheral components on the peripheral bus 318. In some alternative architectures, the functionality of the north bridge can be incorporated into the processor instead of using a separate north bridge chip. In some instances, system 300 can include an accelerator card 322 attached to the peripheral bus 318. The accelerator can include field programmable gate arrays (FPGAs) or other hardware for accelerating certain processing. For example, an accelerator can be used for adaptive data restructuring or to evaluate algebraic expressions used in extended set processing.

[0161] Software and data are stored in external storage 324 and can be loaded into RAM 310 and/or cache 304 for use by the processor. The system 300 includes an operating system for managing system resources; non-limiting examples of operating systems include: Linux, Windows™, MACOS™, BlackBerry OS™, iOS™, and other functionally-equivalent operating systems, as well as application software running on top of the operating system for managing data storage and optimization in accordance with example instances of the present disclosure. In this example, system 300 also includes network interface cards (NICs) 320 and 321 connected to the peripheral bus for providing network interfaces to external storage, such as Network Attached Storage (NAS) and other computer systems that can be used for distributed parallel processing.

[0162] FIG. 4 is a diagram showing a network 400 with a plurality of computer systems 402a, and 402b, a plurality of cell phones and personal data assistants 402c, and Network Attached Storage (NAS) 404a, and 404b. In example instances, systems 402a, 402b, and 402c can manage data storage and optimize data access for data stored in Network Attached Storage (NAS) 404a and 404b. A mathematical model can be used for the data and be evaluated using distributed parallel processing across computer systems 402a, and 402b, and cell phone and personal data assistant systems 402c. Computer systems 402a, and 402b, and cell phone and personal data assistant systems 402c can also provide parallel processing for adaptive data restructuring of the data stored in Network Attached Storage (NAS) 404a and 404b. FIG. 4 illustrates an example only, and a wide variety of other computer architectures and systems can be used in conjunction with the various instances of the present disclosure. For example, a blade server can be used to provide parallel processing. Processor blades can be connected through a back plane to provide parallel processing. Storage can also be connected to the back plane or as Network Attached Storage (NAS) through a separate network interface. In some example instances, processors can maintain separate memory spaces and transmit data through network interfaces, back plane or other connectors for parallel processing by other processors. In other instances, some or all of the processors can use a shared virtual address memory space.

[0163] FIG. 5 is a block diagram of a multiprocessor computer system 500 using a shared virtual address memory space in accordance with an example instance. The system includes a plurality of processors 502a-f that can access a shared memory subsystem 504. The system incorporates a plurality of programmable hardware memory algorithm processors (MAPs) 506a-f in the memory subsystem 504. Each MAP 506a-f can comprise a memory 508a-f and one or more field programmable gate arrays (FPGAs) 510a-f. The MAP provides a configurable functional unit and particular algorithms or portions of algorithms can be provided to the FPGAs 510a-f for processing in close coordination with a respective processor. For example, the MAPs can be used to evaluate algebraic expressions regarding the data model and to perform adaptive data restructuring in example instances. In this example, each MAP is globally accessible by all of the processors for these purposes. In one configuration, each MAP can use Direct Memory Access (DMA) to access an associated memory 508a-f, allowing it to execute tasks independently of, and asynchronously from the respective microprocessor 502a-f. In this configuration, a MAP can feed results directly to another MAP for pipelining and parallel execution of algorithms.

[0164] The above computer architectures and systems are examples only, and a wide variety of other computer, cell phone, and personal data assistant architectures and systems can be used in connection with example instances, including systems using any combination of general processors, co-processors, FPGAs and other programmable logic devices, system on chips (SOCs), application specific integrated circuits (ASICs), and other processing and logic elements. In some instances, all or part of the computer system can be implemented in software or hardware. Any variety of data storage media can be used in connection with example instances, including random access memory, hard drives, flash memory, tape drives, disk arrays, Network Attached Storage (NAS) and other local or distributed data storage devices and systems.

[0165] In example instances, the computer system can be implemented using software modules executing on any of the above or other computer architectures and systems. In other instances, the functions of the system can be implemented partially or completely in firmware, programmable logic devices such as field programmable gate arrays (FPGAs) as referenced in FIG. 3, system on chips (SOCs), application specific integrated circuits (ASICs), or other processing and logic elements. For example, the Set Processor and Optimizer can be implemented with hardware acceleration through the use of a hardware accelerator card, such as accelerator card 322 illustrated in FIG. 3.

[0166] The following examples are set forth to illustrate more clearly the principle and practice of embodiments disclosed herein to those skilled in the art and are not to be construed as limiting the scope of any claimed embodiments. Unless otherwise stated, all parts and percentages are on a weight basis.

### EXAMPLES

[0167] The following examples are given for the purpose of illustrating various embodiments of the disclosure and are not meant to limit the present disclosure in any fashion. The present examples, along with the methods described herein are presently representative of preferred embodiments, are exemplary, and are not intended as limitations on the scope of the disclosure. Changes therein and other uses which are encompassed within the spirit of the disclosure as defined by the scope of the claims will occur to those skilled in the art.

### Example 1: Functionalization of a Device Surface

[0168] A device was functionalized to support the attachment and synthesis of a library of polynucleotides. The device surface was first wet cleaned using a piranha solution comprising 90% H₂SO₄ and 10% H₂O₂ for 20 minutes. The device was rinsed in several beakers with DI water, held under a DI water gooseneck faucet for 5 min, and dried with N₂. The device was subsequently soaked in NH₄OH (1:100; 3 mL: 300 mL) for 5 min, rinsed with DI water using a handgun, soaked in three successive beakers with DI water for 1 min each, and then rinsed again with DI water using the handgun. The device was then plasma cleaned by exposing the device surface to O₂. A SAMCO PC-300 instrument was used to plasma etch O₂ at 250 watts for 1 min in downstream mode.

[0169] The cleaned device surface was actively functionalized with a solution comprising N-(3-triethoxysilylpropyl)-4-hydroxybutyramide using a YES-1224P vapor deposition oven system with the following parameters: 0.5 to 1 torr, 60 min, 70° C., 135° C. vaporizer. The device surface was resist coated using a Brewer Science 200X spin coater. SPR™ 3612 photoresist was spin coated on the device at 2500 rpm for 40 sec. The device was pre-baked for 30 min at 90° C. on a Brewer hot plate. The device was subjected to photolithography using a Karl Suss MA6 mask aligner instrument. The device was exposed for 2.2 sec and developed for 1 min in MSF 26A. Remaining developer was rinsed with the handgun and the device soaked in water for 5 min. The device was baked for 30 min at 100° C. in the oven, followed by visual inspection for lithography defects using a Nikon L200. A descum process was used to remove residual resist using the SAMCO PC-300 instrument to O₂ plasma etch at 250 watts for 1 min.

[0170] The device surface was passively functionalized with a 100 μL solution of perfluorooctyltrichlorosilane mixed with 10 μL light mineral oil. The device was placed in a chamber, pumped for 10 min, and then the valve was closed to the pump and left to stand for 10 min. The chamber was vented to air. The device was resist stripped by performing two soaks for 5 min in 500 mL NMP at 70° C. with ultrasonication at maximum power (9 on Crest system). The device was then soaked for 5 min in 500 mL isopropanol at room temperature with ultrasonication at maximum power. The device was dipped in 300 mL of 200 proof ethanol and blown dry with N₂. The functionalized surface was activated to serve as a support for polynucleotide synthesis.

### Example E 2: Synthesis of a 50-mer Sequence on an Oligonucleotide Synthesis Device

[0171] A two dimensional oligonucleotide synthesis device was assembled into a flowcell, which was connected to a flowcell (Applied Biosystems (ABI394 DNA Synthesizer”). The two-dimensional oligonucleotide synthesis device was uniformly functionalized with N-(3-TRIETHOXYSILYLPROPYL)-4-HYDROXYBUTYRAMIDE (Gelest) was used to synthesize an exemplary polynucleotide of 50 bp (“50-mer polynucleotide”) using polynucleotide synthesis methods described herein.

[0172] The sequence of the 50-mer was as described in SEQ ID NO.: 164. 5′AGACAATCAACCATTIGGGGTGGACAGCCTTGACCTCTAGACTTCGGCAT##TTTTTTTTTT3′ (SEQ ID NO.: 164), where #denotes Thymidine-succinyl hexamide CED phosphoramidite (CLP-2244 from ChemGenes), which is a cleavable linker enabling the release of oligos from the surface during deprotection.

[0173] The synthesis was done using standard DNA synthesis chemistry (coupling, capping, oxidation, and deblocking) according to the protocol in Table 2 and an ABI synthesizer.

TABLE 2
Synthesis protocol

| General DNA Synthesis | Table 2 | |
|---|---|---|
| Process Name | Process Step | Time (sec) |
| WASH (Acetonitrile Wash | Acetonitrile System Flush | 4 |
| Flow) | Acetonitrile to Flowcell | 23 |
| | N2 System Flush | 4 |
| | Acetonitrile System Flush | 4 |
| DNA BASE ADDITION | Activator Manifold Flush | 2 |
| (Phosphoramidite + | Activator to Flowcell | 6 |
| Activator Flow) | Activator + | 6 |
| | Phosphoramidite to | |
| | Flowcell | |
| | Activator to Flowcell | 0.5 |
| | Activator + | 5 |
| | Phosphoramidite to | |
| | Flowcell | |
| | Activator to Flowcell | 0.5 |
| | Activator + | 5 |
| | Phosphoramidite to | |
| | Flowcell | |
| | Activator to Flowcell | 0.5 |
| | Activator + | 5 |
| | Phosphoramidite to | |
| | Flowcell | |
| | Incubate for 25 sec | 25 |
| WASH (Acetonitrile Wash | Acetonitrile System Flush | 4 |
| Flow) | Acetonitrile to Flowcell | 15 |
| | N2 System Flush | 4 |
| | Acetonitrile System Flush | 4 |
| DNA BASE ADDITION | Activator Manifold Flush | 2 |
| (Phosphoramidite + | Activator to Flowcell | 5 |
| Activator Flow) | Activator + | 18 |
| | Phosphoramidite to | |
| | Flowcell | |
| | Incubate for 25 sec | 25 |
| WASH (Acetonitrile Wash | Acetonitrile System Flush | 4 |
| Flow) | Acetonitrile to Flowcell | 15 |
| | N2 System Flush | 4 |
| | Acetonitrile System Flush | 4 |
| CAPPING (CapA + B, 1:1, | CapA + B to Flowcell | 15 |
| Flow) | | |
| WASH (Acetonitrile Wash | Acetonitrile System Flush | 4 |
| Flow) | Acetonitrile to Flowcell | 15 |
| | Acetonitrile System Flush | 4 |
| OXIDATION (Oxidizer | Oxidizer to Flowcell | 18 |
| Flow) | | |
| WASH (Acetonitrile Wash | Acetonitrile System Flush | 4 |
| Flow) | N2 System Flush | 4 |
| | Acetonitrile System Flush | 4 |
| | Acetonitrile to Flowcell | 15 |
| | Acetonitrile System Flush | 4 |
| | Acetonitrile to Flowcell | 15 |
| | N2 System Flush | 4 |
| | Acetonitrile System Flush | 4 |
| | Acetonitrile to Flowcell | 23 |
| | N2 System Flush | 4 |
| | Acetonitrile System Flush | 4 |
| DEBLOCKING (Deblock | Deblock to Flowcell | 36 |
| Flow) | | |
| WASH (Acetonitrile Wash | Acetonitrile System Flush | 4 |
| Flow) | N2 System Flush | 4 |
| | Acetonitrile System Flush | 4 |
| | Acetonitrile to Flowcell | 18 |
| | N2 System Flush | 4.13 |
| | Acetonitrile System Flush | 4.13 |
| | Acetonitrile to Flowcell | 15 |

[0174] The phosphoramidite/activator combination was delivered similar to the delivery of bulk reagents through the flowcell. No drying steps were performed as the environment stays “wet” with reagent the entire time.

[0175] The flow restrictor was removed from the ABI 394 synthesizer to enable faster flow. Without flow restrictor, flow rates for amidites (0.1M in ACN), Activator, (0.25M Benzoylthiotetrazole (“BTT”; 30-3070-xx from GlenResearch) in ACN), and Ox (0.02M 12 in 20% pyridine, 10% water, and 70% THF) were roughly ˜100 uL/sec, for acetonitrile (“ACN”) and capping reagents (1:1 mix of CapA and CapB, wherein CapA is acetic anhydride in THF/Pyridine and CapB is 16% 1-methylimidizole in THF), roughly ˜200 uL/sec, and for Deblock (3% dichloroacetic acid in toluene), roughly ˜300 uL/sec (compared to ˜50 uL/sec for all reagents with flow restrictor). The time to completely push out Oxidizer was observed, the timing for chemical flow times was adjusted accordingly and an extra ACN wash was introduced between different chemicals. After polynucleotide synthesis, the chip was deprotected in gaseous ammonia overnight at 75 psi. Five drops of water were applied to the surface to recover polynucleotides. The recovered polynucleotides were then analyzed on a BioAnalyzer small RNA chip.

### Example 3: Synthesis of a 100-mer Sequence on an Oligonucleotide Synthesis Device

[0176] The same process as described in Example 2 for the synthesis of the 50-mer sequence was used for the synthesis of a 100-mer polynucleotide (“100-mer polynucleotide”; 5′ CGGGATCCTTATCGTCATCGTCGTACAGATCCCGACCCATTTGCTGTCCACCAGTCATGCTAGCCATACCATGATGATGATGATGATGAGAACCCCGCAT##TTTTTTTTTT3′, where # denotes Thymidine-succinyl hexamide CED phosphoramidite (CLP-2244 from ChemGenes); SEQ ID NO.: 165) on two different silicon chips, the first one uniformly functionalized with N-(3-TRIETHOXYSILYLPROPYL)-4-HYDROXYBUTYRAMIDE and the second one functionalized with 5/95 mix of 11-acetoxyundecyltriethoxysilane and n-decyltriethoxysilane, and the polynucleotides extracted from the surface were analyzed on a BioAnalyzer instrument.

[0177] All ten samples from the two chips were further PCR amplified using a forward (5′ATGCGGGGTTCTCATCATC3′; SEQ ID NO.: 166) and a reverse (5′CGGGATCCTTATCGTCATCG3′; SEQ ID NO.: 167) primer in a 50 uL PCR mix (25 uL NEB Q5 mastermix, 2.5 uL 10 uM Forward primer, 2.5 uL 10 uM Reverse primer, 1 uL polynucleotide extracted from the surface, and water up to 50 uL) using the following thermalcycling program:
[0178] 98° C., 30 sec
[0179] 98° C., 10 sec; 63° C., 10 sec; 72° C., 10 sec; repeat 12 cycles
[0180] 72° C., 2 min

[0181] The PCR products were also run on a BioAnalyzer, demonstrating sharp peaks at the 100-mer position. Next, the PCR amplified samples were cloned, and Sanger sequenced. Table 3 summarizes the results from the Sanger sequencing for samples taken from spots 1-5 from chip 1 and for samples taken from spots 6-10 from chip 2.

TABLE 3
Sequencing results

| Spot | Error rate | | Cycle efficiency |
|---|---|---|---|
| 1 | 1/763 | bp | 99.87% |
| 2 | 1/824 | bp | 99.88% |
| 3 | 1/780 | bp | 99.87% |
| 4 | 1/429 | bp | 99.77% |
| 5 | 1/1525 | bp | 99.93% |
| 6 | 1/1615 | bp | 99.94% |
| 7 | 1/531 | bp | 99.81% |
| 8 | 1/1769 | bp | 99.94% |
| 9 | 1/854 | bp | 99.88% |
| 10 | 1/1451 | bp | 99.93% |

[0182] Thus, the high quality and uniformity of the synthesized polynucleotides were repeated on two chips with different surface chemistries. Overall, 89% of the 100-mers that were sequenced were perfect sequences with no errors, corresponding to 233 out of 262.

[0183] Table 4 summarizes error characteristics for the sequences obtained from the polynucleotide samples from spots 1-10.

TABLE 4
Error characteristics

| | Sample ID/Spot no. | | | | | | | | | |
|---|---|---|---|---|---|---|---|---|---|---|
| | OSA_ | OSA_ | OSA_ | OSA_ | OSA_ | OSA_ | OSA_ | OSA_ | OSA_ | OSA_ |
| | 0046/1 | 0047/2 | 0048/3 | 0049/4 | 0050/5 | 0051/6 | 0052/7 | 0053/8 | 0054/9 | 0055/10 |
| Total | 32 | 32 | 32 | 32 | 32 | 32 | 32 | 32 | 32 | 32 |
| Sequences | | | | | | | | | | |
| Sequencing | 25 of 28 | 27 of 27 | 26 of 30 | 21 of 23 | 25 of 26 | 29 of 30 | 27 of 31 | 29 of 31 | 28 of 29 | 25 of 28 |
| Quality | | | | | | | | | | |
| Oligo | 23 of 25 | 25 of 27 | 22 of 26 | 18 of 21 | 24 of 25 | 25 of 29 | 22 of 27 | 28 of 29 | 26 of 28 | 20 of 25 |
| Quality | | | | | | | | | | |
| ROI | 2500 | 2698 | 2561 | 2122 | 2499 | 2666 | 2625 | 2899 | 2798 | 2348 |
| Match | | | | | | | | | | |
| Count | | | | | | | | | | |
| ROI | 2 | 2 | 1 | 3 | 1 | 0 | 2 | 1 | 2 | 1 |
| Mutation | | | | | | | | | | |
| ROI Multi | 0 | 0 | 0 | 0 | 0 | 0 | 0 | 0 | 0 | 0 |
| Base | | | | | | | | | | |
| Deletion | | | | | | | | | | |
| ROI Small | 1 | 0 | 0 | 0 | 0 | 0 | 0 | 0 | 0 | 0 |
| Insertion | | | | | | | | | | |
| ROI | 0 | 0 | 0 | 0 | 0 | 0 | 0 | 0 | 0 | 0 |
| Single | | | | | | | | | | |
| Base | | | | | | | | | | |
| Deletion | | | | | | | | | | |
| Large | 0 | 0 | 1 | 0 | 0 | 1 | 1 | 0 | 0 | 0 |
| Deletion | | | | | | | | | | |
| Count | | | | | | | | | | |
| Mutation: | 2 | 2 | 1 | 2 | 1 | 0 | 2 | 1 | 2 | 1 |
| G > A | | | | | | | | | | |
| Mutation: | 0 | 0 | 0 | 1 | 0 | 0 | 0 | 0 | 0 | 0 |
| T > C | | | | | | | | | | |
| ROI Error | 3 | 2 | 2 | 3 | 1 | 1 | 3 | 1 | 2 | 1 |
| Count | | | | | | | | | | |
| ROI Error | Err: ~1 | Err: ~1 | Err: ~1 | Err: ~1 | Err: ~1 | Err: ~1 | Err: ~1 | Err: ~1 | Err: ~1 | Err: ~1 |
| Rate | in 834 | in 1350 | in 1282 | in 708 | in 2500 | in 2667 | in 876 | in 2900 | in 1400 | in 2349 |
| ROI | MP Err: | MP Err: | MP Err: | MP Err: | MP Err: | MP Err: | MP Err: | MP Err: | MP Err: | MP Err: |
| Minus | ~1 in | ~1 in | ~1 in | ~1 in | ~1 in | ~1 in | ~1 in | ~1 in | ~1 in | ~1 in |
| Primer | 763 | 824 | 780 | 429 | 1525 | 1615 | 531 | 1769 | 854 | 1451 |
| Error Rate | | | | | | | | | | |

### Example 4: VHH Libraries

[0184] Synthetic VHH libraries were developed. For the ‘VHH Ratio’ library with tailored CDR diversity, 2391 VHH sequences (iCAN database) were aligned using Clustal Omega to determine the consensus at each position and the framework was derived from the consensus at each position. The CDRs of all of the 2391 sequences were analyzed for position-specific variation, and this diversity was introduced in the library design. For the ‘VHH Shuffle’ library with shuffled CDR diversity, the iCAN database was scanned for unique CDRs in the nanobody sequences. 1239 unique CDR1's, 1600 unique CDR2's, and 1608 unique CDR3's were identified and the framework was derived from the consensus at each framework position amongst the 2391 sequences in the iCAN database. Each of the unique CDR's was individually synthesized and shuffled in the consensus framework to generate a library with theoretical diversity of 3.2×10\hat{ }9. The library was then cloned in the phagemid vector using restriction enzyme digest. For the ‘VHH hShuffle’ library (a synthetic “human” VHH library with shuffled CDR diversity), the iCAN database was scanned for unique CDRs in the nanobody sequences. 1239 unique CDR1's, 1600 unique CDR2's, and 1608 unique CDR3's were identified and framework 1, 3, and 4 was derived from the human germline DP-47 framework. Framework 2 was derived from the consensus at each framework position amongst the 2391 sequences in the iCAN database. Each of the unique CDR's was individually synthesized and shuffled in the partially humanized framework using the NUGE tool to generate a library with theoretical diversity of 3.2×10\hat{ }9. The library was then cloned in the phagemid vector using the NUGE tool.

[0185] The Carterra SPR system was used to assess binding affinity and affinity distribution for VHH-Fc variants. VHH-Fc demonstrate a range of affinities for TIGIT, with a low end of 12 nM K_{D} and a high end of 1685 nM K_{D} (data not shown). Table 5A provides specific values for the VHH-Fc clones for ELISA, Protein A (mg/ml), and K_{D} (nM). FIG. 7A and FIG. 7B depict TIGIT affinity distribution for the VHH libraries, over the 20-4000 affinity threshold (FIG. 7A; monovalent K_{D}) and the 20-1000 affinity threshold (FIG. 7B; monovalent KD). Out of the 140 VHH binders tested, 51 variants had affinity <100 nM, and 90 variants had affinity <200 nM. FIG. 8 shows data of CDR3 counts per length for the ‘VHH ratio’ library, the ‘VHH shuffle library,’ and the ‘VHH hShuffle library.’ Table 5B shows number of TIGIT unique clones and TIGIT binders for the ‘VHH ratio’ library, the ‘VHH shuffle library,’ and the ‘VHH hShuffle library.’

TABLE 5A

| | | | ProA | K_{D} |
|---|---|---|---|---|
| Clone | ELISA | Library | (mg/m1) | (nM) |
| 31-1 | 5.7 | VHH hShuffle | 0.29 | 12 |
| 31-6 | 9.6 | VHH hShuffle | 0.29 | 14 |
| 31-26 | 5.1 | VHH hShuffle | 0.31 | 19 |
| 30-30 | 8.0 | VHH Shuffle | 0.11 | 23 |
| 31-32 | 8.0 | VHH hShuffle | 0.25 | 27 |
| 29-10 | 5.0 | VHH Ratio | 0.19 | 32 |
| 29-7 | 7.3 | VHH Ratio | 0.28 | 41 |
| 30-43 | 13.5 | VHH Shuffle | 0.18 | 44 |
| 31-8 | 12.7 | VHH hShuffle | 0.29 | 45 |
| 31-56 | 11.7 | VHH hShuffle | 0.26 | 46 |
| 30-52 | 4.2 | VHH Shuffle | 0.22 | 49 |
| 31-47 | 8.8 | VHH hShuffle | 0.23 | 53 |
| 30-15 | 9.3 | VHH Shuffle | 0.26 | 55 |
| 30-54 | 5.5 | VHH Shuffle | 0.30 | 58 |
| 30-49 | 10.3 | VHH Shuffle | 0.26 | 62 |
| 29-22 | 3.4 | VHH Ratio | 0.27 | 65 |
| 29-30 | 9.2 | VHH Ratio | 0.28 | 65 |
| 31-35 | 5.7 | VHH hShuffle | 0.24 | 66 |
| 29-1 | 10.4 | VHH Ratio | 0.09 | 68 |
| 29-6 | 6.8 | VHH Ratio | 0.29 | 69 |
| 31-34 | 6.0 | VHH hShuffle | 0.32 | 70 |
| 29-12 | 6.2 | VHH Ratio | 0.23 | 70 |
| 30-1 | 5.4 | VHH Shuffle | 0.39 | 71 |
| 29-33 | 3.9 | VHH Ratio | 0.15 | 74 |
| 30-20 | 4.6 | VHH Shuffle | 0.19 | 74 |
| 31-20 | 6.6 | VHH hShuffle | 0.37 | 74 |
| 31-24 | 3.1 | VHH hShuffle | 0.15 | 75 |
| 30-14 | 9.9 | VHH Shuffle | 0.19 | 75 |
| 30-53 | 7.6 | VHH Shuffle | 0.24 | 78 |
| 31-39 | 9.9 | VHH hShuffle | 0.32 | 78 |
| 29-18 | 10.9 | VHH Ratio | 0.19 | 78 |
| 30-9 | 8.0 | VHH Shuffle | 0.40 | 79 |
| 29-34 | 8.6 | VHH Ratio | 0.21 | 80 |
| −29-27 | 8.6 | VHH Ratio | 0.18 | 82 |
| 29-20 | 5.9 | VHH Ratio | 0.26 | 83 |
| 30-55 | 6.0 | VHH Shuffle | 0.41 | 85 |
| 30-39 | 6.1 | VHH Shuffle | 0.07 | 88 |
| 31-15 | 6.2 | VHH hShuffle | 0.32 | 88 |
| 29-21 | 4.3 | VHH Ratio | 0.23 | 88 |
| 29-37 | 5.3 | VHH Ratio | 0.26 | 89 |
| 29-40 | 6.6 | VHH Ratio | 0.31 | 90 |
| 31-30 | 3.2 | VHH hShuffle | 0.33 | 93 |
| 31-10 | 12.3 | VHH hShuffle | 0.31 | 94 |
| 29-3 | 13.6 | VHH Ratio | 0.11 | 94 |
| 30-57 | 5.2 | VHH Shuffle | 0.24 | 95 |
| 29-31 | 4.4 | VHH Ratio | 0.18 | 96 |
| 31-27 | 8.1 | VHH hShuffle | 0.31 | 96 |
| 31-33 | 6.0 | VHH hShuffle | 0.32 | 96 |
| 30-40 | 7.1 | VHH Shuffle | 0.21 | 99 |
| 31-18 | 4.1 | VHH hShuffle | 0.36 | 99 |
| 30-5 | 9.3 | VHH Shuffle | 0.05 | 100 |

TABLE 5B
TIGIT unique clones and TIGIT binders

| Library | Unique Phage | VHH-Fc binders |
|---|---|---|
| VHH Ratio | 47 | 36 |
| VHH Shuffle | 58 | 45 |
| VHH hShuffle | 56 | 53 |

[0186] Thermostability and competition analysis of the VHH-Fc TIGIT clones is seen in FIG. 9 and Table 6. For the competition assays, 4 ug/mL TIGIT was immobilized and incubated with 0.05-100 nM VHH-Fc followed by incubation with 2 ug/mL biotin-CD155 and 1:5000 streptavidin-HRP.

TABLE 6
Thermostability of VHH-Fc TIGIT clones

| | | K_{D} | | | |
|---|---|---|---|---|---|
| Variant | Library | (nM) | Tₘ₁ | Tₘ₂ | IC50 (nM) |
| TIGIT-29-10 | Ratio | 32 | 72 | 87 | 17.65 |
| TIGIT-29-7 | Ratio | 41 | 82 | 90 | 9.24 |
| TIGIT-30-30 | Shuffle | 23 | 76 | 87 | 5.67 |
| TIGIT-30-43 | Shuffle | 44 | 82 | 90 | 2.32 |
| TIGIT-31-1 | hShuffle | 12 | 79 | 89 | 17.89 |
| TIGIT-31-6 | hShuffle | 14 | 77 | 87 | 4.00 |
| TIGIT-31-26 | hShuffle | 19 | 79 | 89 | 8.20 |
| TIGIT-31-32 | hShuffle | 27 | 80 | 86 | 2.85 |
| TIGIT-31-8 | hShuffle | 45 | 76 | 84 | 3.92 |
| TIGIT-31-56 | hShuffle | 46 | 74 | 83 | 1.52 |

[0187] CD47 VHH variants were also generated and analyzed. FIG. 10 shows the CD47 affinity distribution. Table 7 shows number of CD47 unique clones and TIGIT binders for the ‘VHH ratio’ library, the ‘VHH shuffle library,’ and the ‘VHH hShuffle library.’ Table 8 shows the binding affinity of the CD47 VHH variants. As seen in Table 8, 8 CD47 VHH binders had an affinity less than 100 nM to hCD47 and 6 CD47 VHH binders had an affinity less than 100 nM to cCD47.

TABLE 7
VHH-Fc CD47 clones

| Library | Unique Phage | VHH-Fc binders |
|---|---|---|
| VHH Ratio | 3 | 2 |
| VHH Shuffle | 1 | 1 |
| VHH hShuffle | 11 | 6 |

TABLE 8
VHH-Fc CD47 binding affinities

| | hCD47 | cCD47 |
|---|---|---|
| Variant | K_{D} (nM) | K_{D} (nM) |
| CD47-19-2 | 35 | 93 |
| CD47-19-3 | 200 | — |
| CD47-20-1 | 49 | 105 |
| CD47-21-1 | 28 | 80 |
| CD47-21-2 | 31 | 80 |
| CD47-21-3 | 19 | 43 |
| CD47-21-4 | 62 | 265 |
| CD47-21-6 | 71 | 69 |
| CD47-21-10 | 38 | 35 |

[0188] Inhibition and thermostability analysis of the VHH-Fc CD47 clones is seen in FIG. 11 and Table 9. For the inhibition assays, 3 ug/mL of CD47 was immobilized and incubated with 0.3-132 nM of VHH-Fc followed by incubation with 0.25 ug/mL biotin-SIRP alpha and 1:5000 streptavidin-HRP.

TABLE 9
Thermostability of VHH-Fc CD47 clones

| | K_{D} | | | SIRPalpha |
|---|---|---|---|---|
| Variant | (nM) | Tₘ₁ | Tₘ₂ | IC50 (nM) |
| CD47-19-2 | 35 | 75 | 88 | 1.13 |
| CD47-19-3 | 200 | 76 | 87 | 1.08 |
| CD47-20-1 | 49 | 78 | 89 | 1.79 |
| CD47-21-1 | 28 | 80 | 88 | 1.68 |
| CD47-21-2 | 31 | 69 | 88 | — |
| CD47-21-3 | 19 | 80 | 88 | 1.35 |
| CD47-21-4 | 62 | 81 | 89 | — |
| CD47-21-6 | 71 | 79 | 88 | — |
| CD47-21-10 | 38 | 71 | 85 | — |

### Example 5. VHH Libraries for GLPIR

[0189] A VHH library for GLPIR was developed similar to methods described in Example 4. Briefly, stable cell lines expressing GLPIR were generated, and target expression was confirmed by FACS. Cells expressing >80% of the target were then used for cell-based selections. Five rounds of cell-based selections were carried out against cells stably overexpressing the target of interest. 10⁸ cells were used for each round of selection. Before selection on target expressing cells, phage from each round was first depleted on 10⁸ CHO background cells. Stringency of selections was increased by increasing the number of washes in subsequent rounds of selections. The cells were then eluted from phage using trypsin, and the phage was amplified for the next round of panning. A total of 1000 clones from round 4 and round 5 are sequenced by NGS to identify unique clones for reformatting as VHH-Fc.

[0190] 53 out of the 156 unique GLPIR VHH Fc binders had a target cell mean fluorescence intensity (MFI) value that was 2-fold over parental cells. The data for variant GLPIR-43-77 is seen in FIGS. 12A-12B and Tables 10-11. Table 11 shows flow cytometry data as detected with the RL1-A channel.

TABLE 10
Panning summary

| | | VHH-Fc FACS |
|---|---|---|
| | | binders |
| | | (MFI values 2-fold |
| Library | Unique Phage | over parental cells) |
| VHH hShuffle | 58 | 6 |
| VHH Ratio/Shuffle | 98 | 47 |

TABLE 11
GLP1R-43-77 data

| Subset Name with Gating Path | Count | Median: RL1-A |
|---|---|---|
| Sample E10.fcs/CHO-parent | 11261 | 237 |
| Sample E10.fcs/CHO-GLP1R | 13684 | 23439 |

### Example 6. VHH Libraries for CRTH2R

[0191] A VHH library for CRTH2R was developed similar to methods described in Example 4.Briefly, stable cell lines expressing CRTH2R were generated, and target expression was confirmed by FACS. Cells expressing >80% of the target were then used for cell-based selections. Five rounds of cell-based selections were carried out against cells stably overexpressing the target of interest. 10⁸ cells were used for each round of selection. Before selection on target expressing cells, phage from each round was first depleted on 10⁸ CHO background cells. Stringency of selections was increased by increasing the number of washes in subsequent rounds of selections. The cells were then eluted from phage using trypsin, and the phage was amplified for the next round of panning. A total of 1000 clones from round 4 and round 5 are sequenced by NGS to identify unique clones for reformatting as VHH-Fc.

[0192] 26 binders out of the 175 unique CRTH2R VHH Fc binders had a target cell mean fluorescence intensity (MFI) value that was 2-fold over parental cells. The data for variant CRTH2-41-51 is seen in FIGS. 13A-13B and Tables 12-13. Table 13 shows flow cytometry data as detected with the RL1-A channel. Data for variant CRTH2-44-59 is seen in FIGS. 14A-14D.

TABLE 12
Panning summary

| | | VHH-Fc FACS |
|---|---|---|
| | | binders |
| | | (MFI values 2 fold |
| Library | Unique Phage | over parental cells) |
| VHH hShuffle | 99 | 16 |
| VHH Ratio/Shuffle | 76 | 10 |

TABLE 13
CRTH2-41-51 data

| Sample Name | Subset Name | Count | Median: RL1-A |
|---|---|---|---|
| Sample C7.fcs | CRTH2R cells | 8663 | 7441 |
| Sample E10.fcs | Parent Cells | 11589 | 2120 |

### Example 7. Identification of IgGs for CRTH2R

[0193] Cell binding of anti-CRTH2R antibodies was determined by testing on CHO CRTH2R-positive cells (GFP+) and parental CHO cells (GFP−), comparing parental negative and target positive cells to rule out false-positives. Antibodies as listed in Table 14A were titrated starting at 100 nM (15 μg/mL) with 3-fold titrations, for a total of 8 points. Heavy and light chain sequences for CRTH2R IgG antibodies are shown in Table 14B. Binding as detected by mean fluorescence intensity (MFI) by concentration is shown in FIGS. 15A-15E. An exemplary gated dot plot and APC histogram at 100 nM with CRTH2-27 is shown in FIGS. 16A-6B. Two antibodies (gPCR-51 and gPCR-52) were used as a positive control. Binding profiles of the two positive controls are shown in FIGS. 17A-17B.

TABLE 14A
CRTH2R antibody variable heavy and light chain sequences

| SEQ | CRTH2R | |
|---|---|---|
| ID NO | Antibody | Heavy Chain |
| 1 | CRTH2-74 | QVQLVESGGGVVQPGRSLRLSCAASGFSFSEYGIHWVRQAPGKGLEWVAVISYE |
| | | GSNEYYADSVKGRFTISRDNSKNTLYLQMNSLRAEDTAVYYCARANQHFGPVA |
| | | GGATPSEEPGSQLTRAELGWDAPPGQESLADELLQLGlEHGYHYYGMDVWGQG |
| | | TLVTVSS |
| 2 | CRTH2-24 | QVQLVQSGAEVKKPGSSVKVSCKASGGSFSNYGISWVRQAPGQGLEWMGGIIPLI |
| | | GTANYAQKFQGRVTITADESTSTAYMELSSLRSEDTAVYYCARDMYYDFTLGPQ |
| | | SIGPLGEVVPADDAFDIWGQGTLVTVSS |
| 3 | CRTH2-28 | QVQLVQSGAEVKKPGSSVNVSCKASGGTFSDYAFSWVRQAPGQGLEWMGAIIPF |
| | | FGTVNYAQKFQGRVTITADESTSTAYMELSSLRSEDTAVYYCARDMYYDFATGT |
| | | GGPEDDLYPQGELNDGYRIEVVPADDAFDIWGQGTLVTVSS |
| 4 | CRTH2-39 | QVQLVQSGAEVKKPGSSVKVSCKASVDTFSRYSISWVRQAPGQGLEWMGGIIPV |
| | | FDTTNYAQKFQGRVTITADESTSTAYMELSSLRSEDTAVYYCARDMYYDFGVIL |
| | | GGTAVGTNNGSANEVVPADDAFDIWGQGTLVTVSS |
| 5 | CRTH2-19 | QVQLVQSGAEVKKPGSSVKVSCKASGGTFSSHAINWVRQAPGQGLEWMGRIIPIV |
| | | GTTTYAQKFQGRVTITADESTSTAYMELSSLRSEDTAVYYCARDMYYDFDYFGL |
| | | TLTGDRNDDEVVPADDAFDIWGQGTLVTVSS |
| 6 | CRTH2-9 | QVQLVQSGAEVKKPGSSVKVSCKASGGTFSSYAISWVRQAPGQGLEWMGGIIPIF |
| | | GTANYAQKFQGRVTITADESTSTAYMELSSLRSEDTAVYYCARDMYYDFWLGD |
| | | QSTGSLIGAEVVPADDAFDIWGQGTLVTVSS |
| 7 | CRTH2-8 | QVQLVQSGAEVKKPGSSVKVSCKASGGTFTDYAISWVRQAPGQGLEWMGGIIPF |
| | | FGSPNYAQKFQGRVTITADESTSTAYMELSSLRSEDTAVYYCARDMYYDFAAGL |
| | | EGTITEVFDEEGHQGGTEVVPADDAFDIWGQGTLVTVSS |
| 8 | CRTH2-27 | QVQLVESGGGVVQPGRSLRLSCAASGFTFDNYGMHWVRQAPGKGLEWVAVISY |
| | | EGSNKKYADSVKGRFTISRDNSKNTLYLQMNSLRAEDTAVYYCARDMYYDFGSI |
| | | YGEDVVGELPEVVPADDAFDIWGQGTLVTVSS |
| 9 | CRTH2-45 | QVQLVESGGGVVQPGRSLRLSCAASGFTFSHYAMHWVRQAPGKGLEWVADISH |
| | | EGSNKYYADSVKGRFTISRDNSKNTLYLQMNSLRAEDTAVYYCARDGRGSLPRP |
| | | KGGPTSGGGFSTNIGYGFVVQSYDSSEDSGGAFDIWGQGTLVTVSS |
| 10 | CRTH2-35 | QVQLVQSGAEVKKPGSSVKVSCKASGGTFRSYAISWVRQAPGQGLEWMGGIIPIS |
| | | GTTNYAQKFQGRVTITADESTSTAYMELSSLRSEDTAVYYCARANQHFTRIFGNY |
| | | QIYFGHFGYHYYGMDVWGQGTLVTVSS |
| 11 | CRTH2-50 | QVQLVQSGAEVKKPGSSVKVSCKASGGTFSSYALSWVRKAPGQGLEWMGGTIPI |
| | | FGTVNYAQKFQGRVTITADESTSTAYMELSSLRSEDTAVYYCARANQHFTRVIGQ |
| | | PSPAVPSRGYIYHGYHYYGMDVWGQGTLVTVSS |
| 12 | CRTH2-66 | QVQLVESGGGVVQPGRSLRLSCAASGFDFSGYGMHWVRQAPGKGLEWVAVISY |
| | | EGSNKFYADSVKGRFTISRDNSKNTLYLQMNSLRAEDTAVYYCARDLRELECEE |
| | | WTIEVHGQEFAVHQDRGGVFSRGPCVDPRGVAGSFDVWGQGTLVTVSS |
| 13 | CRTH2-57 | QVQLVQSGAEVKKPGSSVKVSCKASGGTFSSYAMSWVRQAPGQGLEWMGGIIPL |
| | | FGTTDYAQKFQGRVTITADESTSTAYMELSSLRSEDTAVYYCARANQHFVKIQGA |
| | | PVSTPVPGFGTTGYHYYGMDVWGQGTLVTVSS |
| 14 | CRTH2-32 | QVQLVESGGGVVQPGRSLRLSCAASGFTFSKHGMHWVRQAPGKGLEWVAFISY |
| | | EGSEKYYADSVKGRFTISRDNSKNTLYLQMNSLRAEDTAVYYCARDMYYDFHY |
| | | STVGATYYYYLGSETEVVPADDAFDIWGQGTLVTVSS |
| 15 | CRTH2-15 | QVQLVQSGAEVKKPGSSVKVSCKASGGTFSTYAIDWVRQAPGQGLEWMGGIIPL |
| | | FGSPNYAQKFQGRVTITADESTSTAYMELSSLRSEDTAVYYCARANQHFFLYEGT |
| | | SSSWLHVGHARYGYHYYGMDVWGQGTLVTVSS |
| 16 | CRTH2-25 | QVQLVQSGAEVKKPGSSVKVSCKASGGSFRSYGISWVRQAPGQGLEWMGRIIPLF |
| | | GTPDYAQKFQGRVTITADESTSTAYMELSSLRSEDTAVYYCARDMYYDFEDVDE |
| | | GSLYLDMGRTFEVVPADDAFDIWGQGTLVTVSS |
| 17 | CRTH2-42 | QVQLVESGGGVVQPGRSLRLSCAASGFAFSSYAMHWVRQAPGKGLEWVAVISY |
| | | EGSNEYYADSVKGRFTISRDNSKNTLYLQMNSLRAEDTAVYYCARDLRELECEE |
| | | WTVLQYGKFHMRWAESGEGSLSRGPCVDPRGVAGSFDVWGQGTLVTVSS |
| 18 | CRTH2-55 | QVQLVESGGGVVQPGRSLRLSCAASGFTFRSYDMHWVRQAPGKGLEWVAVISY |
| | | EGSEKYYADSVKGRFTISRDNSKNTLYLQMNSLRAEDTAVYYCAKHMSMQAST |
| | | EGDFGLEEVTGEGVDDRADLVGDAFDVWGQGTLVTVSS |
| 19 | CRTH2-60 | QVQLVQSGAEVKKPGSSVKVSCKASGGTFKNYAINWVRQAPGQGLEWMGAIIP |
| | | KFGAANYAQKFQGRVTITADESTSTAYMELSSLRSEDTAVYYCARANQHFSAVR |
| | | GLAFGYGYRIGGYHYYGMDVWGQGTLVTVSS |
| 20 | CRTH2-70 | QVQLVQSGAEVKKPGSSVKVSCKASGGTFSNHAIIWVRQAPGQGLEWMGGIIPIF |
| | | GTPSYAQKFQGRVTITADESTSTAYMELSSLRSEDTAVYYCARDMYYDFDVISAG |
| | | VVGAGNPEVVPADDAFDIWGQGTLVTVSS |
| 21 | CRTH2-48-9 | EVQLLESGGGLVQPGGSLRLSCAASGFSFSTHAMSWVRQAPGKGLEWVSTIGGS |
| | | GGSTYYADSVKGRFTISRDNSKNTLYLQMNSLRAEDTAVYYCARAHGDSSSWYF |
| | | SYYYMDVWGQGTLVTVSS |
| 22 | CRTH2-41-51 | EVQLVESGGGLVQPGGSLRLSCAASGGIFRFNAMGWFRQAPGKERELVAGISGSG |
| | | GDTYYADSVKGRFTISADNSKNTAYLQMNSLKPEDTAVYYCAAFRGIMRPDWG |
| | | QGTLVTVSS |
| 23 | CRTH2-44-6 | EVQLVESGGGLVQPGGSLRLSCAASGPTFDTYVMGWFRQAPGKEREFVAAISMS |
| | | GDDTAYADSVKGRFTISADNSKNTAYLQMNSLKPEDTAVYYCATDLRGRGDVS |
| | | EYEYDWGQGTLVTVSS |
| SEQ | CRTH2R | |
| ID NO | Antibody | Light Chain |
| 24 | CRTH2-74 | QSVLTQPPSVSAAPGQKVTISCSGSTSNIGKNYVSWYQQLPGTAPKLLIYDDDERP |
| | | SGIPDRFSGSMSGTSATLGITGLQTGDEADYYCEAWDADLSGAVFGGGTKLTVL |
| 25 | CRTH2-24 | QSVLTQPPSVSAAPGQKVTISCSGSSSNIGNNFVSWYQQLPGTAPKLLIYDNIQRP |
| | | SGIPDRFSGSKSGTSATLGITGLQTGDEADYYCGTWDTSLSAVVFGGGTKLTVLRT |
| | | VAAPSVFIFPPSDEQLKSGTASVVCLLNNFYPREAKVQWKVDNALQSGNSQESVT |
| | | EQDSKDSTYSLSSTLTLSKADYEKHKVYACEVTHQGLSSPVTKSFNRGEC |
| 26 | CRTH2-28 | QSVLTQPPSVSAAPGQKVTISCSGSISNIGKNYVSWYQQLPGTAPKLLIYDDHKRP |
| | | SGIPDRFSGSKSGTSATLGITGLQTGDEADYYCATWDRGLSAAVFGGGTKLTVL |
| 27 | CRTH2-39 | QSVLTQPPSVSAAPGQKVTISCSGSSSNIGDNDVSWYQQLPGTAPKLLIYDDDKRP |
| | | SGIPDRFSGSKSGTSATLGITGLQTGDEADYYCASWDTSLSGGYVFGGGTKLTVL |
| 28 | CRTH2-19 | QSALTQPASVSGSPGQSITISCTGTSSDVGGYDYVTWYQQHPGKAPKLMIYDVDT |
| | | RPSGVSNRFSGSKSGNTASLTISGLQAEDEADYYCSSYTTSTSYVFGGGTKLTVL |
| 29 | CRTH2-9* | QSVLTQPPSVSAAPGQKVTISCSGSTSNIGNNYVSWYQQLPGTAPKLLIYENDERP |
| | | SGIPDRFSGSKSGTSATLGITGLQTGDEADYYCATWDTRLSAVVFGGGTKLTVL |
| 30 | CRTH2-8 | QSVLTQPPSVSAAPGQKVTISCSGSSSNIGKNYVSWYQQLPGTAPKLLIYDNNQRP |
| | | SGIPDRFSGSKSGTSATLGITGLQTGDEADYYCGTWDTSLTSVVFGGGTKLTVL |
| 31 | CRTH2-27 | QSALTQPASVSGSPGQSITISCTGTSNDVGAYNFVSWYQQHPGKAPKLMIYDISNR |
| | | PSGVSNRFSGSKSGNTASLTISGLQAEDEADYYCSSYTRSNTRVFGGGTKLTVL |
| 32 | CRTH2-45 | QSVLTQPPSVSAAPGQKVTISCSGTSSNIENNYVSWYQQLPGTAPKLLIYDNVKRP |
| | | SGIPDRFSGSKSGTSATLGITGLQTGDEADYYCGTWDNTVSAPWVFGGGTKLTVL |
| 33 | CRTH2-35 | QSALTQPASVSGSPGQSITISCTGTSSDIGGYEFVSWYQQHPGKAPKLMIYGVSRR |
| | | PSGVSNRFSGSKSGNTASLTISGLQAEDEADYYCGSYTSSSTPYVFGGGTKLTVL |
| 34 | CRTH2-50 | QSALTQPASVSGSPGQSITISCTGTSSDIGGYNFVSWYQQHPGKAPKLMIYDVSNR |
| | | PQGVSNRFSGSKSGNTASLTISGLQAEDEADYYCSSYTSSNTYVVFGGGTKLTVL |
| 35 | CRTH2-66 | EIVMTQSPATLSVSPGERATLSCRASQGVGSNLAWYQQKPGQAPRLLIYRTSIRAT |
| | | GIPARFSGSGSGTEFTLTISSLQSEDFAVYYCQQYYSWPPLTFGGGTKVEIK |
| 36 | CRTH2-57 | QSVLTQPPSVSAAPGQKVTISCSGSSSNIEDNYVSWYQQLPGTAPKLLIYDNFKRP |
| | | SGIPDRFSGSKSGTSATLGITGLQTGDEADYYCGTWDTSLSAALFGGGTKLTVL |
| 37 | CRTH2-32 | QSALTQPASVSGSPGQSITISCTGTSSGVGGYDYVSWYQQHPGKAPKLMIYDDNN |
| | | RPSGVSNRFSGSKSGNTASLTISGLQAEDEADYYCSSYTGSSTLYVFGGGTKLTVL |
| 38 | CRTH2-15 | QSVLTQPPSVSAAPGQKVTISCSGSGSNIGSNYVSWYQQLPGTAPKLLIYDNIRRP |
| | | SGIPDRFSGSKSGTSATLGITGLQTGDEADYYCAAWDTRLSAGVFGGGTKLTVL |
| 39 | CRTH2-25 | DIQMTQSPSSLSASVGDRVTITCRASQGISTYLNWYQQKPGKAPKLLIYATSSLQS |
| | | GVPSRFSGSGSGTDFTLTISSLQPEDFATYYCQQSYSTP-WTFGGGTKVEIK |
| 40 | CRTH2-42 | QSALTQPASVSGSPGQSITISCTGTSSDVGGYRYVSWYQQHPGKAPKLMIYNVNY |
| | | RPSGVSNRFSGSKSGNTASLTISGLQAEDEADYYCSSYRSSSTLGVFGGGTKLTVL |
| 41 | CRTH2-55 | QSVLTQPPSVSAAPGQKVTISCSGSSSNIGDNFVSWYQQLPGTAPKLLIYDDDERP |
| | | SGIPDRFSGSKSGTSATLGITGLQTGDEADYYCGAWDRSLSAVVFGGGTKLTVL |
| 42 | CRTH2-60 | QSVLTQPPSVSAAPGQKVTISCSGSTSNIGINYVSWYQQLPGTAPKLLIYENRKRP |
| | | SGIPDRFSGSKSGTSATLGITGLQTGDEADYYCATWDASLKNLVFGGGTKLTVL |
| 43 | CRTH2-70 | QSVLTQPPSVSAAPGQKVTISCSGSTSNIGNNFVSWYQQLPGTAPKLLIYDNEKRP |
| | | SGIPDRFSGSKSGTSATLGITGLQTGDEADYYCGTWDERQTDESYVFGGGTKLTV |
| | | L |
| 44 | CRTH2-9A | QSVLTQPPSVSAAPGQKVTISCSGSTSNIGNNYVSWYQQLPGTAPKLLIYENDERP |
| | | SGIPDRFSGSKSGTSATLGITGLQTGDEADYYCATWDTRLSAVVFGGETKLT |
| 45 | CRTH2-48-9 | DIQMTQSPSSLSASVGDRVTITCRASQSISDYVNWYQQKPGKAPKLLIYGASILQT |
| | | GVPSRFSGSGSGTDFTLTISSLQPEDFATYYCQQSFTTPWTFGGGTKVEIK |

TABLE 14B
Variably Heavy Chain CDR3 Sequences

| SEQ | CRTH2R | |
|---|---|---|
| ID NO | Antibody | CDRH3 |
| 46 | CRTH2-74 | CARANQHFGPVAGGATPSEEPGSQLTRAELGWDA |
| | | PPGQESLADELLQLGTEHGYHHYYGMDVW |
| 47 | CRTH2-24 | CARDMYYDFTLGPQSIGPLGEVVPADDAFDIW |
| 48 | CRTH2-28 | CARDMYYDFATGTGGPEDDLYPQGELNDGYRIEV |
| | | VPADDAFDIW |
| 49 | CRTH2-39 | CARDMYYDFGVILGGTAVGTNNGSANEVVPADDA |
| | | FDIW |
| 50 | CRTH2-19 | CARDMYYDFDYFGLTLTGDRNDDEVVPADDAFDI |
| | | W |
| 51 | CRTH2-9 | CARDMYYDFWLGDQSTGSLIGAEVVPADDAFDIW |
| 52 | CRTH2-8 | CARDMYYDFAAGLEGTITEVFDEEGHQGGTEVVP |
| | | ADDAFDIW |
| 53 | CRTH2-27 | CARDMYYDFGSIYGEDVVGELPEVVPADDAFDIW |
| 54 | CRTH2-45 | CARDGRGSLPRPKGGPTSGGGFSTNIGYGFVVQS |
| | | YDSSEDSGGAFDIW |
| 55 | CRTH2-35 | CARANQHFTRIFGNYQIYFGHFGYHYYGMDVW |
| 56 | CRTH2-50 | CARANQHFTRVIGQPSPAVPSRGYIYHGYHYY |
| | | GMDVW |
| 57 | CRTH2-66 | CARDLRELECEEWTIEVHGQEFAVHQDRGGVFSR |
| | | GPCVDPRGVAGGSFDVW |
| 58 | CRTH2-57 | CARANQHFVKIQGAPVSTPVPGFGTTGYHYYGM |
| | | DVW |
| 59 | CRTH2-32 | CARDMYYDFHYSTVGATYYYYLGSETEVVPADDA |
| | | FDIW |
| 60 | CRTH2-15 | CARANQHFFLYEGTSSSWLHVGHARYGYHYYYGM |
| | | DVW |
| 61 | CRTH2-25 | CARDMYYDFEDVDEGSLYLDMGRTFEVVPADDAF |
| | | DIW |
| 62 | CRTH2-42 | CARDLRELECEEWTVLQYGKFHMRWAESGEGSLS |
| | | RGPCVDPRGVAGSFDVW |
| 63 | CRTH2-55 | CAKHMSMQASTEGDFGLEEVTGEGVDDRADLVGD |
| | | AFDVM |
| 64 | CRTH2-60 | CARANQHFSAVRGLAFGYGYRIGGYHYYGMDVW |
| 65 | CRTH2-70 | CARDMYYDFDVISAGVVGAGNPEVVPADDAFDIW |
| 66 | CRTH2-74 | CARDMYYDFDVISAGVVGAGNPEVVPADDAFDIW |

[0194] In subsequent examples, five antibodies were shown to have functional effects in cAMP assays: CRTH2-9, CRTH2-27, CRTH2-50, CRTH2-32, and CRTH2-42. The binding curves of these antibodies are compared in FIGS. 18A-18B.

### Example & Antagonist activity using cAMP assay

[0195] A library of CRTH2R IgG antibodies were assayed to determine antagonist function in PGD2-induced cAMP signals. Briefly, cells were pre-incubated with IgG (titration 1:3) for 1 hour at room temperature. Subsequently, cells were stimulated with PGD2 (0.59 nM) for 30 min at 37° C. in the presence of forskolin, since CRTH2R is Gai coupled.

[0196] Effect of antibody on detected signal in relative light units (rlu) was determined (data not shown). At the highest concentration tested (300 nM), some of the CRTH2R IgGs caused an upward deflection of the signal, indicating inhibition of the CAMP signal induced by PGD2 stimulation. For comparison, bar charts showing the ratio of IgG treated versus control treated for the three highest IgG concentrations tested are shown in FIG. 19A. Antibodies depicted in FIG. 19B show CRTH2R IgG antibodies which resulted in more than a 20% antagonist activity at 33 nM, specifically CRTH2-74, CRTH2-24, CRTH2-28, CRTH2-19, CRTH2-45, CRTH2-9, CRTH2-8, CRTH2-15, CRTH2-42, CRTH2-60, and CRTH2-70.

### Example 9. Allosteric Modulation of PGD2-Induced cAMP Signal

[0197] CRTH2R IgG antibodies were assayed for allosteric activity. Allosteric modulation was determined by assaying CRTH2R IgG antibodies in PGD2-induced cAMP signal. Briefly, cells were re-incubated with no IgG antibody or 100 nM CRTH2R IgG antibody. Subsequently, cells were stimulated with PGD2 at various concentrations in the presence of forskolin followed by assay for cAMP activity.

[0198] Results of the CAMP assays is seen in FIG. 20. A right-ward shift the PGD2 dose response curve (and increase in IC50 value) indicates a negative allosteric effect. As shown in FIG. 20, five of the CRTH2R IgG (CRTH2-9, CRTH2-27, CRTH2-50, CRTH2-32, and CRTH2-42) caused an IC50 fold difference of >2.0 compared with PGD2 alone, suggesting they are negative allosteric modulators.

### Example 10. Agonist Activity of PGD2-Induced cAMP Signal

[0199] CRTH2R IgG antibodies were assayed for agonist function. Agonist activity was determined by assaying CRTH2R IgG antibodies described in Example 7 in PGD2-induced cAMP signal.

[0200] Briefly, cells were treated with PGD2 or CRTH2R IgG antibodies both in the presence of forskolin. The CRTH2R IgG antibodies included CRTH2-74, CRTH2-24, CRTH2-28, CRTH2-39, CRTH2-19, CRTH2-9, CRTH2-8, CRTH2-27, CRTH2-45, CRTH2-35, CRTH2-50, CRTH2-66, CRTH2-57, CRTH2-32, CRTH2-15, CRTH2-25, CRTH2-42, CRTH2-55, CRTH2-60, and CRTH2-70. Treatment stimulations were performed for 30 min at 37° C. cAMP assays were then performed (data not shown).

### Example 11. Control Experiments Showing Allosteric Modulators

[0201] Allosteric modulation was determined for a known CRTH2R antagonist (small molecule OC000459) and two control antibodies. Experiments were performed similar to those described in Example 9. Briefly, cells were treated with OC000459, comparator CRTH2R AB51 antibody, or comparator CRTH2R AB52 antibody. Cells were then stimulated with PGD2 in the presence of forskolin.

[0202] Results are shown in FIGS. 21A-21C. OC000459 causes a strong right-ward shift of the curve and a 459-fold increase in the IC50 value (FIG. 21A). Incubation with CRTH2R AB51 caused no change in IC50 value (FIG. 21B). Incubation with the comparator antibody #52 caused a 3.5-fold decrease in the IC50 value, indicating it is a positive allosteric modulator, i.e. it has agonistic effects (FIG. 21C).

### Example 12. CRTH2R β-Arrestin Recruitment Assay for Antagonist Modulation

[0203] Antagonist modulation by nine CRTH2R IgG antibodies was determined. The nine CRTH2R IgG antibodies included CRTH2-9, CRTH2-27, CRTH2-50, CRTH2-32, CRTH2-42, CRTH2-74, CRTH2-55, CRTH2-28, and CRTH2-39. The antagonist function of these nine antibodies as compared to OC000459 was determined using a PGD2-induced β-arrestin recruitment. Results, including a positive control using small molecule OC000459, are shown in FIGS. 22A-22D.

### Example 13. CRTH2R β-Arrestin Recruitment Assay for Allosteric Modulation

[0204] Allosteric modulation by nine CRTH2R IgGs were determined. The nine CRTH2R IgGs included CRTH2-9, CRTH2-27, CRTH2-50, CRTH2-32, CRTH2-42, CRTH2-74, CRTH2-55, CRTH2-28, and CRTH2-39. The allosteric modulation of these nine antibodies as compared to OC000459 was determined using a PGD2-induced β-arrestin recruitment.

[0205] Briefly, cells were pre-incubated with IgG (100 nM) for 1 hour at room temperature followed by PGD2 stimulation for 90 min at 37° C. Data was normalized against the first data point (lowest PGD2 and zero Ab) in each graph.

### Example 14. Hyperimmune Immunoglobulin Library

[0206] A hyperimmune immunoglobulin (IgG) library was created using similar methods as described in Example 4. Briefly, the hyperimmune IgG library was generated from analysis of databases of human naïve and memory B-cell receptor sequences consisting of more than 37 million unique IgH sequences from each of 3 healthy donors. More than two million CDRH3 sequences were gathered from the analysis and individually constructed using methods similar to Examples 1-3. Any duplicate CDRH3′s and potential liability motifs that frequently pose problems in development were removed during the library synthesis step. These CDRH3 sequence diversities were then combinatorially assembled and incorporated onto the DP47 human framework to construct a highly functional antibody Fab library with 1×10¹⁰ size. A schematic of the design can be seen in FIG. 24.

[0207] The heavy chain CDR length distribution of the hyperimmune antibody libraries were assessed by next generation sequencing (NGS). The data of CDR length distribution is shown in FIGS. 25A-25B. Generally, selection of soluble protein targets undergo five rounds of selection involving a PBST wash three times in Round 1, a PBST wash five times in Round 2, a PBST wash seven times in Round 3, a PBST wash nine times in Round 4, and a PBST wash twelve times in Round 5. A non-fat milk block was used. See FIG. 26.

[0208] For human TIGIT (hTIGIT), 1 uM biotinylated antigen was mixed with 300 ul Dynabead M-280 at 10 mg/mL to generate a concentration of 100 pmol per 100 ul. The details of the various rounds of selection are seen in Table 15.

TABLE 15
Protein panning selection

| | | | |
|---|---|---|---|
| Round | Washes | Antigen Amount | Concentration |

Manual

| | | | | | |
|---|---|---|---|---|---|
| 1 | 3 | 100 | pmol | 1 | uM |
| 2 | 6 | 20 | pmol | 200 | nM |
| 3 | 9 | 10 | pmol | 100 | nM |
| 4 | 12 | 5 | pmol | 50 | nM |
| 5 | 12 | 5 | pmol | 50 | nM |

Kingfisher (KF)

| | | | | | |
|---|---|---|---|---|---|
| 1 | 2 | 100 | pmol | 1 | uM |
| 2 | 4 | 20 | pmol | 200 | nM |
| 3 | 6 | 10 | pmol | 100 | nM |
| 4 | 8 | 5 | pmol | 50 | nM |
| 5 | 8 | 5 | pmol | 50 | nM |

[0209] After various rounds of selection, hTIGIT IgGs were analyzed. Data is seen in FIGS. 27A-27F and Table 16. FIGS. 27A-27D show ELISA data from Round 3 and Round 4. FIGS. 27E-27F show data of CDRH3 length, yield (ug), and K_{D} (nM) for the hTIGIT IgGs analyzed.

TABLE 16
Protein panning data

| | | | | | KF | | |
|---|---|---|---|---|---|---|---|
| Round | Target | Antigen | | Washes | Washes | Titer | KF liter |
| 1 | hTIGIT | 100 | pmol | 3 | — | 4.40E+06 | — |
| 2 | hTIGIT | 50 | pmol | 5 | 4 | 4.40E+07 | 6.80E+06 |
| 3 | hTIGIT | 20 | pmol | 7 | 4 | 6.00E+08 | 2.80E+09 |
| 4 | hTIGIT | 10 | pmol | 9 | 5 | 5.00E+08 | 6.00E+08 |
| 5 | hTIGIT | 10 | pmol | — | — | — | — |

[0210] Seventeen non-identical hTIGIT immunoglobulins were identified with monovalent affinity ranging from 16 nM to over 300 nM. Most of these immunoglobulins expressed well and produced over 20 ug purified protein at 1 ml expression volume. Sequences for hTIGIT immunoglobulins are seen in Table 17.

TABLE 17
TIGIT sequences

| | | |
|---|---|---|
| SEQ ID | | |
| NO: | IgG | Amino Acid Sequence |

CDRH3

| | | |
|---|---|---|
| 67 | TIGIT-55-01 | CARVAGSSGWAFDYW |
| 68 | TIGIT-55-02 | CATLRLYSSGGGIDYW |
| 69 | TIGIT-55-03 | CARIVGATTRTYYYYGMDVW |
| 70 | TIGIT-55-04 | CARVRNRASDIW |
| 71 | TIGIT-55-05 | CARAPYSSSSWFDYW |
| 72 | TIGIT-55-06 | CARNSYGPPRSFGMDVW |
| 73 | TIGIT-55-07 | CARTPYRSGWADYW |
| 74 | TIGIT-55-08 | CTRSWYYYYGMDVW |
| 75 | TIGIT-55-09 | CARGYGGYGYW |
| 76 | TIGIT-55-10 | CAKAGDYDYYFDYW |
| 77 | TIGIT-55-11 | CASVKRWGYYFNWW |
| 78 | TIGIT-55-12 | CARVRVGAYDAFDIW |
| 79 | TIGIT-55-13 | CARNSGWFMPFDYW |
| 80 | TIGIT-55-14 | CARRGSGWYIDSW |
| 81 | TIGIT-55-15 | CARREGDYMGPNWFDPW |
| 82 | TIGIT-55-16 | CASIRERRFDFW |
| 83 | TIGIT-55-17 | CARHSLTPYNFWSGYYSRSFDIW |

Variable Heavy Chain

| | | |
|---|---|---|
| 84 | TIGIT-55-01 | EVQLLESGGGLVQPGGSLRLSCAASGFTFGSYGMSWVRQAPGKGLEWVSSISG |
| | | SGSTTYYADSVKGRFTISRDNSKNTLYLQMNSLRAEDTAVYYCARVAGSSGW |
| | | AFDYWGQGTLVTVSS |
| 85 | TIGIT-55-02 | EVQLLESGGGLVQPGGSLRLSCAASGLTFSNYAMTWVRQAPGKGLEWVSGISR |
| | | SGGSTYYADSVKGRFTISRDNSKNTLYLQMNSLRAEDTAVYYCATLRLYSSGG |
| | | GIDYWGQGTLVTVSS |
| 86 | TIGIT-55-03 | EVQLLESGGGLVQPGGSLRLSCAASGFTFHNYAMTWVRQAPGKGLEWVSAIT |
| | | GSGTSTYYADSVKGRFTISRDNSKNTLYLQMNSLRAEDTAVYYCARIVGATTR |
| | | TYYYYGMDVWGQGTLVTVSS |
| 87 | TIGIT-55-04 | EVQLLESGGGLVQPGGSLRLSCAASGFRFGNYAMSWVRQAPGKGLEWVSAIT |
| | | GSGGNTFYADSVKGRFTISRDNSKNTLYLQINSLRAEDTAVYYCARVRNRASDI |
| | | WGQGTLVTVSS |
| 88 | TIGIT-55-05 | EVQLLESGGGLVQPGGSLRLSCAASGFVFSSYAMNWVRQAPGKGLEWVSTVS |
| | | GSGGTTYYADSVKGRFTISRDNSKNTLYLQMNSLRAEDTAVYYCARAPYSSSS |
| | | WFDYWGQGTLVTVSS |
| 89 | TIGIT-55-06 | EVQLLESGGGLVQPGGSLRLSCAASGFTFSRYTMNWVRQAPGKGLEWVSGISG |
| | | SGGGAYYADSVKGRFTISRDNSKNTLYLQMNSLRAEDTAVYYCARNSYGPPRS |
| | | FGMDVWGQGTLVTVSS |
| 90 | TIGIT-55-07 | EVQLLESGGGLVQPGGSLRLSCAASGFTFSSYGMTWVRQAPGKGLEWVSAISG |
| | | RGSSTYYADSVKGRFTISRDNSKNTLYLQMNSLRAEDTAVYYCARTPYRSGW |
| | | ADYWGQGTLVTVSS |
| 91 | TIGIT-55-08 | EVQLLESGGGLVQPGGSLRLSCAASGFMFSDYAMSWVRQAPGKGLEWVSGIS |
| | | GSGGYTYYADSVKGRFTISRDNSKNTLYLQMNSLRAEDTAVYYCTRSWYYYY |
| | | GMDVWGQGTLVTVSS |
| 92 | TIGIT-55-09 | EVQLLESGGGLVQPGGSLRLSCAASGFAFRSYAMGWVRQAPGKGLEWVSTIS |
| | | GGGGNTYYADSVKGRFTISRDNSKNTLYLQMNSLRAEDTAVYYCARGYGGY |
| | | GYWGQGTLVTVSS |
| 93 | TIGIT-55-10 | EVQLLESGGGLVQPGGSLRLSCAASGFTFSKSAMSWVRQAPGKGLEWVSAISG |
| | | SGGLTYYADSVKGRFTISRDNSKNTLYLQMNSLRAEDTAVYYCAKAGDYDYY |
| | | FDYWGQGTLVTVSS |
| 94 | TIGIT-55-11 | EVQLLESGGGLVQPGGSLRLSCAASGFTFTNYGMSWVRQAPGKGLEWVSSISG |
| | | SGSTTYYADSVKGRFTISRDNSKNTLYLQMNSLRAEDTAVYYCASVKRWGYY |
| | | FNWWGQGTLVTVSS |
| 95 | TIGIT-55-12 | EVQLLESGGGLVQPGGSLRLSCAASGFTLSSYAMAWVRQAPGKGLEWVSTLS |
| | | GSGGSTYYADSVKGRFTISRDNSKNTLYLQMNSLRAEDTAVYYCARVRVGAY |
| | | DAFDIWGQGTLVTVSS |
| 96 | TIGIT-55-13 | EVQLLESGGGLVQPGGSLRLSCAASGFTFSTYGMNWVRQAPGKGLEWVSTISG |
| | | SGGSTYFADSVKGRFTISRDNSKNTLYLQMNSLRAEDTAVYYCARNSGWFMPF |
| | | DYWGQGTLVTVSS |
| 97 | TIGIT-55-14 | EVQLLESGGGLVQPGGSLRLSCAASGFMFSRYAMSWVRQAPGKGLEWVSSISG |
| | | SGGTTYYADSVKGRFTISRDNSKNTLYLQMNSLRAEDTAVYYCARRGSGWYI |
| | | DSWGQGTLVTVSS |
| 98 | TIGIT-55-15 | EVQLLESGGGLVQPGGSLRLSCAASGFTFSDYAMGWVRQAPGKGLEWVSTISG |
| | | SGSRTYYADSVKGRFTISRDNSKNTLYLQMNSLRAEDTAVYYCARREGDYMG |
| | | PNWFDPWGQGTLVTVSS |
| 99 | TIGIT-55-16 | EVQLLESGGGLVQPGGSLRLSCAASGFAFSSYAMGWVRQAPGKGLEWVSAITS |
| | | SGGGTYYADSVKGRFTISRDNSKNTLYLQMNSLRAEDTAVYYCASIRERRFDF |
| | | WGQGTLVTVSS |
| 100 | TIGIT-55-17 | EVQLLESGGGLVQPGGSLRLSCAASGFTFSNHAMAWVRQAPGKGLEWVSGIS |
| | | GSGGYTYYADSVKGRFTISRDNSKNTLYLQMNSLRAEDTAVYYCARHSLTPY |
| | | NFWSGYYSRSFDIWGQGTLVTVSS |

Variable Light Chain

| | | |
|---|---|---|
| 101 | TIGIT-55-01 | DIQMTQSPSSLSASVGDRVTITCRASQAISNYLNWYQQKPGKAPKLLIYAASRL |
| | | QSGVPSRFSGSGSGTDFTLTISSLQPEDFATYYCQESYSTPFTFGGGTKVEIK |
| 102 | TIGIT-55-02 | DIQMTQSPSSLSASVGDRVTITCRASQYISTYLNWYQQKPGKAPKLLIYAASSL |
| | | QGGVPSRFSGSGSGTDFTLTISSLQPEDFATYYCQQNYITPLTFGGGTKVEIK |
| 103 | TIGIT-55-03 | DIQMTQSPSSLSASVGDRVTITCRASQYISSYLNWYQQKPGKAPKLLIYGAFSL |
| | | QSGVPSRFSGSGSGTDFTLTISSLQPEDFATYYCQQSYITPYTFGGGTKVEIK |
| 104 | TIGIT-55-04 | DIQMTQSPSSLSASVGDRVTITCRASQTIITYLNWYQQKPGKAPKLLIYAASNLR |
| | | SGVPSRFSGSGSGTDFTLTISSLQPEDFATYYCQQSYSLPWTFGGGTKVEIK |
| 105 | TIGIT-55-05 | DIQMTQSPSSLSASVGDRVTITCRASQSVRSYLNWYQQKPGKAPKLLIYTATSL |
| | | ESGVPSRFSGSGSGTDFTLTISSLQPEDFATYYCQQSYGLPRTFGGGTKVEIK |
| 106 | TIGIT-55-06 | DIQMTQSPSSLSASVGDRVTITCRASQSISKYLNWYQQKPGKAPKLLIYGASSLR |
| | | GGVPSRFSGSGSGTDFTLTISSLQPEDFATYYCQQSYRPPLTFGGGTKVEIK |
| 107 | TIGIT-55-07 | DIQMTQSPSSLSASVGDRVTITCRASQNIKTYLNWYQQKPGKAPKLLIYAASSL |
| | | HTGVPSRFSGSGSGTDFTLTISSLQPEDFATYYCQQTYSIPQTFGGGTKVEIK |
| 108 | TIGIT-55-08 | DIQMTQSPSSLSASVGDRVTITCRAGQSIRSYLNWYQQKPGKAPKLLIYASSNL |
| | | QSGVPSRFSGSGSGTDFTLTISSLQPEDFATYYCQQSYSTPLLTFGGGTKVEIK |
| 109 | TIGIT-55-09 | DIQMTQSPSSLSASVGDRVTITCRASQSIRRYLNWYQQKPGKAPKLLIYAASTL |
| | | QIGVPSRFSGSGSGTDFTLTISSLQPEDFATYYCQQTYSSPYTFGGGTKVEIK |
| 110 | TIGIT-55-10 | DIQMTQSPSSLSASVGDRVTITCRTSQSIRRYLNWYQQKPGKAPKLLIYRASRL |
| | | QSGVPSRFSGSGSGTDFTLTISSLQPEDFATYYCQQSYNTLRTFGGGTKVEIK |
| 111 | TIGIT-55-11 | DIQMTQSPSSLSASVGDRVTITCRASQNINYYLNWYQQKPGKAPKLLIYGASSL |
| | | QNGVPSRFSGSGSGTDFTLTISSLQPEDFATYYCQQSYITPYTGGGTKVEIK |
| 112 | TIGIT-55-12 | DIQMTQSPYSLSASVGDRVTITCRASQSIRRYLNWYQQKPGKAPKLLTYRASTL |
| | | QTGVPSRFSGSGSGTDFTLTISSLQPEDFATYYCQQTYSSPFTFGGGTKVEIK |
| 113 | TIGIT-55-13 | DIQMTQSPSSLSASVGDRVTITCRTSQSISTYLNWYQQKPGKAPKLLIYATSRLQ |
| | | SGVPSRFSGSGSGTDFTLTISSLQPEDFATYYCQQSYTTPLTFGGGTKVEIK |
| 114 | TIGIT-55-14 | DIQMTQSPSSLSASVGDRVTITCRASQSVSRYLNWYQQKPGKAPKLLIYGSSNL |
| | | QSGVPSRFSGSGSGTDFTLTISSLQPEDFATYYCQESYSTPFTFGGGTKVEIK |
| 115 | TIGIT-55-15 | DIQMTQSPSSLSASVGDRVTITCRASQAISRNLNWYQQKPGKAPKLLIYGASNL |
| | | QTGVPSRFSGSGSGTDFTLTISSLQPEDFATYYCQQSHSTPVTFGGGTKVEIK |
| 116 | TIGIT-55-16 | DIQMTQSPSSLSASVGDRVTITCRASQRISTYLNWYQQKPGKAPKLLIYGTSSLQ |
| | | SGVPSRFSGSGSGTDFTLTISSLQPEDFATYYCQQSYIIPWTFGGGTKVEIK |
| 117 | TIGIT-55-17 | DIQMTQSPSSLSASVGDRVTITCRASQSISSYVNWYQQKPGKAPKLLIYGASRL |
| | | QDGVPSRFSGSGSGTDFTLTISSLQPEDFATYYCQQSYITPYTFGGGTKVEIK |

[0211] Identification of human CD3 epsilon (hCD3) and cyno CD3 epsilon (cCD3)

[0212] immunoglobulins was performed. The details of the various rounds of selection are seen in Table 18.

TABLE 18
Protein panning selection

| | | |
|---|---|---|
| Round | Washes | Concentration |

Manual

| | | |
|---|---|---|
| 1 | 3 | 500 nM hCD3 and 500 nM cCD3 |
| 2 | 6 | 100 nM hCD3 |
| 3 | 9 | 50 nM hCD3 |
| 4 | 12 | 50 nM hCD3 |
| 5 | 12 | 10 nM hCD3 |

Kingfisher (KF)

| | | |
|---|---|---|
| 1 | 2 | 500 nM hCD3 and 500 nM cCD3 |
| 2 | 4 | 100 nM hCD3 |
| 3 | 6 | 50 nM hCD3 |
| 4 | 8 | 50 nM hCD3 |
| 5 | 8 | 10 nM hCD3 |

[0213] After various rounds of selection, CD3 epsilon (CD3ε) IgGs were analyzed. Data is seen in FIGS. 28A-28L and Tables 19A-19B. FIGS. 28A-28F show ELISA data from Round 4 and Round 5. FIGS. 28G-28L show data of cross-reactivity of human CD3 epsilon and cyno CD3 epsilon immunoglobulins.

TABLE 19A
Protein panning data

| | | | | | KF | | |
|---|---|---|---|---|---|---|---|
| Round | Target | Antigen | | Washes | Washes | Titer | KF Titer |
| 1 | hCD3/ | 100 | pmol | 3 | — | 2.40E+06 | — |
| | cCD3 | | | | | | |
| 2 | hCD3 | 50 | pmol | 5 | 4 | 1.20E+08 | 1.80E+06 |
| 3 | cCD3 | 20 | pmol | 7 | 4 | 8.00E+06 | 2.40E+07 |
| 4 | hCD3 | 10 | pmol | 9 | 5 | 1.00E+07 | 2.10E+06 |
| 5 | cCD3 | 10 | pmol | 12 | 7 | 1.50E+07 | 1.00E+08 |

TABLE 19B

| | | | | | Output |
|---|---|---|---|---|---|
| Round | Target | Antigen | | Washes | Titer |
| 1 | hCD3 | 5 | ug | 4 | 9.00E+04 |
| 2 | cCD3 | 5 | ug | 5 | 1.40E+05 |
| 3 | hCD3 | 2.5 | ug | 6 | 3.00E+06 |
| 4 | cCD3 | 2.5 | ug | 7 | 4.00E+06 |
| 5 | hCD3 | 2.5 | ug | 8 | 2.20E+07 |

[0214] Nineteen non-identical hCD3 epsilon and cyno CD3 epsilon immunoglobulins were identified including five that are human/cyno CD3 epsilon cross-reactive immunoglobulins. One of the human/cyno CD3 epsilon cross-reactive antibody, CD3-56-05 binds to human and cyno CD3epsilon with 67 and 107 nM affinity, respectively. Sequences for hCD3 epsilon and cCD3 epsilon immunoglobulins are seen in Table 20.

TABLE 20
CD3 epsilon sequences

| | | |
|---|---|---|
| SEQ ID | | |
| NO: | IgG | Amino Acid Sequence |

Variable Heavy Chain CDR1 (CDRH1)

| | | |
|---|---|---|
| 118 | CD3-138-6 | GYTFTSNMH |
| 119 | CD3-56-5 | FTFSSYAMN |
| 120 | CD3-155-03 | FTFSSYAIN |

Variable Heavy Chain CDR2 (CDRH2)

| | | |
|---|---|---|
| 121 | CD3-138-6 | VASISSYYGYTYYA |
| 122 | CD3-56-5 | VSAVSGSGGRTYYA |
| 123 | CD3-155-03 | VSALSGSGGSTYYA |

Variable Heavy Chain CDR3 (CDRH3)

| | | |
|---|---|---|
| 124 | CD3-138-6 | GGNYYNLWTGYYPLAY |
| 125 | CD3-56-5 | ARERATTLDY |
| 126 | CD3-155-03 | ARRSAQLGDY |
| 127 | CD3-56-5A | CARERATTLDYW |
| 128 | CD3-56-11 | CARDSLTTRGYYYYMDVW |

Variable Light Chain CDR1 (CDRL1)

| | | |
|---|---|---|
| 129 | CD3-138-6 | RASQDISTYLN |
| 130 | CD3-56-5 | RASQTIYSHLN |
| 131 | CD3-155-03 | RASQSISSFLN |

Variable Light Chain CDR2 (CDRL2)

| | | |
|---|---|---|
| 132 | CD3-138-6 | YTDRLQT |
| 133 | CD3-56-5 | VASRLQS |
| 134 | CD3-155-03 | AAPSLQS |

Variable Light Chain CDR3 (CDRL3)

| | | |
|---|---|---|
| 135 | CD3-138-6 | QQGGALPFT |
| 136 | CD3-56-5 | QQSFSTSWT |
| 137 | CD3-155-03 | QQSFRTPFT |

Variable Heavy Chain

| | | |
|---|---|---|
| 138 | CD3-56-5 | EVQLLESGGGLVQPGGSLRLSCAASGFTFSSYAMNWVRQAPGKGLEWVSAVSGS |
| | | GGRTYYADSVKGRFTISRDNSKNTLYLQMNSLRAEDTAVYYCARERATTLDYW |
| | | GQGTLVTVSS |
| 139 | CD3-56-11 | EVQLLESGGGLVQPGGSLRLSCAASGFRFSTYAMNWVRQAPGKGLEWVSGISGS |
| | | GGSKYHADSVKGRFTISRDNSKNTLYLQMNSLRAEDTAVYYCARDSLTTRGYYY |
| | | YMDVWGQGTLVTVSS |
| 140 | CD3-138-6 | EVQLLESGGGLVQPGGSLRLSCAASGGYTFTSNMHWVRQAPGKGLEWVASISSY |
| | | YGYTYYADSVKGRFTISRDNSKNTLYLQMNSLRAEDTAVYYCGGNYYNLWTGY |
| | | YPLAYWGQGTLVTVSS |
| 141 | CD3-155-9 | EVQLLESGGGLVQPGGSLRLSCAASGFTFSNYALNWVRQAPGKGLEWVSAVTGS |
| | | GGSTYYADSVKGRFTISRDNSKNTLYLQMNSLRAEDTAVYYCARVRATTLDYW |
| | | GQGTLVTVSS |

Variable Light Chain

| | | |
|---|---|---|
| 142 | CD3-56-5 | DIQMTQSPSSLSASVGDRVTITCRASQTIYSHLNWYQQKPGKAPKLLIYVASRLQS |
| | | GVPSRFSGSGSGTDFTLTISSLQPEDFATYYCQQSFSTSWTFGGGTKVEIK |
| 143 | CD3-56-11 | DIQMTQSQSSLSASVGDRVTITCRASQSIRTSLNWYQQPGKAPKLLIYAASRLQSG |
| | | VPSRFSGSGSGTDFTLTISSLQPEDFATYYCQQSYSTLYSFGGGTKVEIK |
| 144 | CD3-138-6 | DIQMTQSPSSLSASVGDRVTITCRASQDISTYLNWYQQKPGKAPKLLIYYTDRLQT |
| | | GVPSRFSGSGSGTDFTLTISSLQPEDFATYYCQQGGALPFTFGQGTKVEIK |
| 145 | CD3-155-9 | DIQMTQSPSSLSASVGDRVTITCRTSQSISTYLNWYQQKPGKAPKLLIYTASRLQS |
| | | GVPSRFSGSGSGTDFTLTISSLQPEDFATYYCQQSYSTPWTFGGGTKVEIK |

[0215] A CRTH2R hyperimmune immunoglobulin library was generated. Briefly, five rounds of cell-based selections were carried out against cells stably overexpressing the target of interest. 10⁸ cells were used for each round of selection. Before selection on target expressing cells, phage from each round was first depleted on 10⁸ CHO background cells. Stringency of selections was increased by increasing the number of washes in subsequent rounds of selections. The cells were then eluted from phage using trypsin, and the phage gets amplified for the next round of panning.

[0216] CRTH2R immunoglobulins were assessed for binding affinity and allosteric modulator function of PGD2-induced CAMP. As seen in FIGS. 30A-30F, three specific CRTH2R immunoglobulins were identified with sub nanomolar to single digit nanomolar cell binding affinities to hCRTH2R and had inhibitory activities in the allosteric cAMP assay. The sequences for the three CRTH2R immunoglobulins CRTH2-48-3, CRTH2-48-21, and CRTH2-48-27 are seen in Table 21.

TABLE 21
CRTH2R sequences

| | | |
|---|---|---|
| SEQ | | |
| ID | | |
| NO: | IgG | Amino Acid Sequence |

Variable Heavy Chain

| | | |
|---|---|---|
| 146 | CRTH2-48-3 | EVQLVESGGGLVQAGGSLRLSCAASGSIFRINAMGWFRQAPGKEREGVAAINNF |
| | | GTTKYADSVKGRFTISADNAKNTVYLQMNSLKPEDTAVYYCAAVRWGPRNDD |
| | | RYDWGQGTQVTVSS |
| 147 | CRTH2-48-21 | EVQLVESGGGLVQAGGSLRLSCAASGSFFSINAMGWFRQAPGKEREFVAGITRS |
| | | GVSTSYADSVKGRFTISADNAKNTVYLQMNSLKPEDTAVYYCAAHRIVVGGTS |
| | | VGDWRWGQGTQVTVSS |
| 148 | CRTH2-48-27 | EVQLVESGGGLVQAGGSLRLSCAASGSIFHINAMGWFRQAPGKEREGVAAINNF |
| | | GTTKYADSVKGRFTISANNAKNTVYLQMNSLKPEDTAVYYCAAVRWGPRNDD |
| | | RYDWGQGTLVTVSS |

Variable Light Chain

| | | |
|---|---|---|
| 149 | CRTH2-48-3 | DIQMTQSPSSLSASVGDRVTITCRASQSISSDLNWYQQKPGKAPKLLIYFASGLQS |
| | | GVPSRFSGSGSGTDFTLTISSLQPEDFATYYCQQSYSSPLTFGGGTKVEIKR |
| 150 | CRTH2-48-21 | DIQMTQSPSSLSASVGDRVTITCRTSQSISNYLNWYQQKPGKAPKLLIYATSSLES |
| | | GVPSRFSGSGSGTDFTLTISSLQPEDFATYYCQQSYSTLLTFGGGTKVEIKR |
| 151 | CRTH2-48-27 | DIQMTQSPSSLSASVGDRVTITCRASQSISRYLHWYQQKPGKAPKLLIYGASRLE |
| | | SGVPSRFSGSGSGTDFTLTISSLQPEDFATYYCRQSYSTPWTFGGGTKVEIKR |

### Example 15. Hyperimmune Immunoglobulin Library for A2A Receptor

[0217] A hyperimmune immunoglobulin (IgG) library was created using similar methods as described in Examples 4 and 14. Briefly, the hyperimmune IgG library was generated from analysis of databases of human naïve and memory B-cell receptor sequences consisting of more than 37 million unique IgH sequences from each of 3 healthy donors. More than two million CDRH3 sequences were gathered from the analysis and individually constructed using methods similar to Examples 1-3. The CDRH3 sequences were incorporated into the VHH hShuffle library described in Example 4. The final library diversity was determined to be 1.3×10¹⁰.

[0218] 73 out of 88 unique clones had a target cell MFI values 2 fold over parental cells. 15 out of 88 unique Clones with target cell MFI values 20 fold over parental cells. Data for adenosine A2A receptor variant A2AR-90-007 is seen in FIGS. 31A-31B.

[0219] This Example shows generation of a VHH library for the A2AR with high affinity and K_{D} values in the sub-nanomolar range.

[0220] While preferred embodiments of the present disclosure have been shown and described herein, it will be obvious to those skilled in the art that such embodiments are provided by way of example only. Numerous variations, changes, and substitutions will now occur to those skilled in the art without departing from the disclosure. It should be understood that various alternatives to the embodiments of the disclosure described herein may be employed in practicing the disclosure. It is intended that the following claims define the scope of the disclosure and that methods and structures within the scope of these claims and their equivalents be covered thereby.

The application's sequence listing, which the Patent Office published only in electronic form, follows.

SEQUENCE LISTING (2438 sequences)

SEQ ID NO: 1 - protein, 395 aa, unidentified
  source 1..395: note = Description of unidentified: CRTH2R sequence
MSANATLKPLCPILEQMSRLQSHSNTSIRYIDHAAVLLHGLASLLGLVENGVILFVVGCRMRQTVVTTWVLHLALSDLLASASLPFFTYFLAVGHSWELGTTFCKLHSSIFFLNMFASGFLLSAISLDRCLQVVRPVWAQNHRTVAAAHKVCLVLWALAVLNTVPYFVFRDTISRLDGRIMCYYNVLLLNPGPDRDATCNSRQAALAVSKFLLAFLVPLAIIASSHAAVSLRLQHRGRRRPGRFVRLVAAVVAAFALCWGPYHVFSLLEARAHANPGLRPLVWRGLPFVTSLAFFNSVANPVLYVLTCPDMLRKLRRSLRTVLESVLVDDSELGGAGSSRRRRTSSTARSASPLALCSRPEEPRGPARLLGWLLGSCAASPQTGPLNRALSSTSS

SEQ ID NO: 2 - DNA, 62 bp, synthetic construct
  modified_base 51..52: mod_base = OTHER; note = Thymidine-succinyl hexamide CED phosphoramidite
  source 1..62: mol_type = other DNA
agacaatcaaccatttggggtggacagccttgacctctagacttcggcattttttttttttt

SEQ ID NO: 3 - DNA, 112 bp, synthetic construct
  modified_base 101..102: mod_base = OTHER; note = Thymidine-succinyl hexamide CED phosphoramidite
  source 1..112: mol_type = other DNA
cgggatccttatcgtcatcgtcgtacagatcccgacccatttgctgtccaccagtcatgctagccataccatgatgatgatgatgatgagaaccccgcattttttttttttt

SEQ ID NO: 4 - DNA, 19 bp, synthetic construct
  source 1..19: mol_type = other DNA
atgcggggttctcatcatc

SEQ ID NO: 5 - DNA, 20 bp, synthetic construct
  source 1..20: mol_type = other DNA
cgggatccttatcgtcatcg

SEQ ID NO: 6 - DNA, 45 bp, synthetic construct
  source 1..45: mol_type = other DNA
gcagccgctggcttgctgctgctggcagctcagccggccatggcc

SEQ ID NO: 7 - DNA, 60 bp, synthetic construct
  source 1..60: mol_type = other DNA
gctagcggtggaggcggttcaggcggaggtggctctggcggtggcggatcgcatgcatcc

SEQ ID NO: 8 - DNA, 42 bp, synthetic construct
  source 1..42: mol_type = other DNA
cgcgcggccgctggaagcggctcccaccatcaccatcaccat

SEQ ID NO: 9 - protein, 22 aa, synthetic construct
QSVLTQPPSVSAAPGQKVTISC

SEQ ID NO: 10 - DNA, 66 bp, synthetic construct
  source 1..66: mol_type = other DNA
cagtctgtgttgacgcagccgccctcagtgtctgcggccccaggacagaaggtcaccatctcctgc

SEQ ID NO: 11 - protein, 15 aa, synthetic construct
WYQQLPGTAPKLLIY

SEQ ID NO: 12 - DNA, 45 bp, synthetic construct
  source 1..45: mol_type = other DNA
tggtatcagcagctcccaggaacagcccccaaactcctcatttat

SEQ ID NO: 13 - protein, 31 aa, synthetic construct
GIPDRFSGSKSGTSATLGITGLQTGDEADYY

SEQ ID NO: 14 - DNA, 93 bp, synthetic construct
  source 1..93: mol_type = other DNA
gggattcctgaccgattctctggctccaagtctggcacgtcagccaccctgggcatcaccggactccagactggggacgaggccgattattac

SEQ ID NO: 15 - protein, 9 aa, synthetic construct
GGGTKLTVL

SEQ ID NO: 16 - DNA, 27 bp, synthetic construct
  source 1..27: mol_type = other DNA
ggcggagggaccaagctgaccgtccta

SEQ ID NO: 17 - protein, 13 aa, synthetic construct
SGSSSNIGSNHVS

SEQ ID NO: 18 - protein, 13 aa, synthetic construct
SGSSSNIGNNYLS

SEQ ID NO: 19 - protein, 13 aa, synthetic construct
SGSSSNIANNYVS

SEQ ID NO: 20 - protein, 13 aa, synthetic construct
SGSSPNIGNNYVS

SEQ ID NO: 21 - protein, 13 aa, synthetic construct
SGSRSNIGSNYVS

SEQ ID NO: 22 - protein, 13 aa, synthetic construct
SGSSSNVGDNYVS

SEQ ID NO: 23 - protein, 13 aa, synthetic construct
SGSSSNIGIQYVS

SEQ ID NO: 24 - protein, 13 aa, synthetic construct
SGSSSNVGNNFVS

SEQ ID NO: 25 - protein, 13 aa, synthetic construct
SGSASNIGNNYVS

SEQ ID NO: 26 - protein, 13 aa, synthetic construct
SGSGSNIGNNDVS

SEQ ID NO: 27 - protein, 13 aa, synthetic construct
SGSISNIGNNYVS

SEQ ID NO: 28 - protein, 13 aa, synthetic construct
SGSISNIGKNYVS

SEQ ID NO: 29 - protein, 13 aa, synthetic construct
SGSSSNIGHNYVS

SEQ ID NO: 30 - protein, 13 aa, synthetic construct
PGSSSNIGNNYVS

SEQ ID NO: 31 - protein, 13 aa, synthetic construct
SGSTSNIGIHYVS

SEQ ID NO: 32 - protein, 13 aa, synthetic construct
SGSSSNIGSHYVS

SEQ ID NO: 33 - protein, 13 aa, synthetic construct
SGSSSNIGNEYVS

SEQ ID NO: 34 - protein, 13 aa, synthetic construct
SGSTSNIGNNYIS

SEQ ID NO: 35 - protein, 13 aa, synthetic construct
SGSSSNIGNHFVS

SEQ ID NO: 36 - protein, 13 aa, synthetic construct
SGSSSNIGNNYVA

SEQ ID NO: 37 - protein, 13 aa, synthetic construct
SGSSSNIGSYYVS

SEQ ID NO: 38 - protein, 13 aa, synthetic construct
SGSGFNIGNNYVS

SEQ ID NO: 39 - protein, 13 aa, synthetic construct
SGSTSNIGNNYVS

SEQ ID NO: 40 - protein, 13 aa, synthetic construct
SGSSSDIGNNYVS

SEQ ID NO: 41 - protein, 13 aa, synthetic construct
SGSSSNIGNNVVS

SEQ ID NO: 42 - protein, 13 aa, synthetic construct
SGSKSNIGKNYVS

SEQ ID NO: 43 - protein, 13 aa, synthetic construct
SGSSTNIGNNYVS

SEQ ID NO: 44 - protein, 13 aa, synthetic construct
SGSISNIGDNYVS

SEQ ID NO: 45 - protein, 13 aa, synthetic construct
SGSSSNIGSKDVS

SEQ ID NO: 46 - protein, 13 aa, synthetic construct
SGSSSNIENNDVS

SEQ ID NO: 47 - protein, 13 aa, synthetic construct
SGSSSNIGNHYVS

SEQ ID NO: 48 - protein, 13 aa, synthetic construct
SGSSSNIGKDFVS

SEQ ID NO: 49 - protein, 13 aa, synthetic construct
SGSTSNIGSNFVS

SEQ ID NO: 50 - protein, 13 aa, synthetic construct
SGSTSNIGHNYVS

SEQ ID NO: 51 - protein, 13 aa, synthetic construct
SASSSNIGNNYVS

SEQ ID NO: 52 - protein, 13 aa, synthetic construct
SGSSSSIGNNYVS

SEQ ID NO: 53 - protein, 13 aa, synthetic construct
SGSSSTIGNNYVS

SEQ ID NO: 54 - protein, 13 aa, synthetic construct
SGSSSNIENNYVS

SEQ ID NO: 55 - protein, 13 aa, synthetic construct
SGSSSNIGNQYVS

SEQ ID NO: 56 - protein, 13 aa, synthetic construct
SGSSSNIGNNYVF

SEQ ID NO: 57 - protein, 13 aa, synthetic construct
SGSSSNIGRNYVS

SEQ ID NO: 58 - protein, 13 aa, synthetic construct
SGGSSNIGNYYVS

SEQ ID NO: 59 - protein, 13 aa, synthetic construct
SGSSSNIGDNYVS

SEQ ID NO: 60 - protein, 13 aa, synthetic construct
SGGSSNIGINYVS

SEQ ID NO: 61 - protein, 13 aa, synthetic construct
SGGSSNIGKNYVS

SEQ ID NO: 62 - protein, 13 aa, synthetic construct
SGSSSNIGKRSVS

SEQ ID NO: 63 - protein, 13 aa, synthetic construct
SGSRSNIGNNYVS

SEQ ID NO: 64 - protein, 13 aa, synthetic construct
SGSSSNIGNNLVS

SEQ ID NO: 65 - protein, 13 aa, synthetic construct
SGSSSNIGINYVS

SEQ ID NO: 66 - protein, 13 aa, synthetic construct
SGSSSNIGNNFVS

SEQ ID NO: 67 - protein, 13 aa, synthetic construct
SGTSSNIGRNFVS

SEQ ID NO: 68 - protein, 13 aa, synthetic construct
SGRRSNIGNNYVS

SEQ ID NO: 69 - protein, 13 aa, synthetic construct
SGGSFNIGNNYVS

SEQ ID NO: 70 - protein, 13 aa, synthetic construct
SGSTSNIGENYVS

SEQ ID NO: 71 - protein, 13 aa, synthetic construct
SGSSSNIGSDYVS

SEQ ID NO: 72 - protein, 13 aa, synthetic construct
SGTSSNIGSNYVS

SEQ ID NO: 73 - protein, 13 aa, synthetic construct
SGSSSNIGTNFVS

SEQ ID NO: 74 - protein, 13 aa, synthetic construct
SGSSSNFGNNYVS

SEQ ID NO: 75 - protein, 13 aa, synthetic construct
SGSTSNIGNNHVS

SEQ ID NO: 76 - protein, 13 aa, synthetic construct
SGSSSNIGNDFVS

SEQ ID NO: 77 - protein, 13 aa, synthetic construct
SGSSSDIGDNYVS

SEQ ID NO: 78 - protein, 13 aa, synthetic construct
SGSSSNIGKYYVS

SEQ ID NO: 79 - protein, 13 aa, synthetic construct
SGSSSNIGGNYVS

SEQ ID NO: 80 - protein, 13 aa, synthetic construct
SGSSSNTGNNYVS

SEQ ID NO: 81 - protein, 13 aa, synthetic construct
SGSSSNVGNNYVS

SEQ ID NO: 82 - protein, 13 aa, synthetic construct
SGSSSNIANNFVS

SEQ ID NO: 83 - protein, 13 aa, synthetic construct
SGSSSNIGNDYVS

SEQ ID NO: 84 - protein, 13 aa, synthetic construct
SGSTSNIENNYVS

SEQ ID NO: 85 - protein, 13 aa, synthetic construct
SGGSSNIGNNDVS

SEQ ID NO: 86 - protein, 13 aa, synthetic construct
SGSTSNIGNHYVS

SEQ ID NO: 87 - protein, 13 aa, synthetic construct
SGSSSNIGDNDVS

SEQ ID NO: 88 - protein, 13 aa, synthetic construct
SGYSSNIGNNYVS

SEQ ID NO: 89 - protein, 13 aa, synthetic construct
SGSGSNIGNNFVS

SEQ ID NO: 90 - protein, 13 aa, synthetic construct
SGSSSNIWNNYVS

SEQ ID NO: 91 - protein, 13 aa, synthetic construct
FGSSSNIGNNYVS

SEQ ID NO: 92 - protein, 13 aa, synthetic construct
SGSSSNIEKNYVS

SEQ ID NO: 93 - protein, 13 aa, synthetic construct
SGSRSNIGNYYVS

SEQ ID NO: 94 - protein, 13 aa, synthetic construct
SGTKSNIGNNYVS

SEQ ID NO: 95 - protein, 13 aa, synthetic construct
SGSTSNIGNYYVS

SEQ ID NO: 96 - protein, 13 aa, synthetic construct
SGTSSNIGNNYVA

SEQ ID NO: 97 - protein, 13 aa, synthetic construct
PGTSSNIGNNYVS

SEQ ID NO: 98 - protein, 13 aa, synthetic construct
SGSTSNIGINYVS

SEQ ID NO: 99 - protein, 13 aa, synthetic construct
SGSSSNIGSNLVS

SEQ ID NO: 100 - protein, 13 aa, synthetic construct
SGSSSNIENNHVS

SEQ ID NO: 101 - protein, 13 aa, synthetic construct
SGTRSNIGNNYVS

SEQ ID NO: 102 - protein, 13 aa, synthetic construct
SGSTSNIGDNYVS

SEQ ID NO: 103 - protein, 13 aa, synthetic construct
SGGSSNIGKNFVS

SEQ ID NO: 104 - protein, 13 aa, synthetic construct
SGSRSDIGNNYVS

SEQ ID NO: 105 - protein, 13 aa, synthetic construct
SGTSSNIGNNDVS

SEQ ID NO: 106 - protein, 13 aa, synthetic construct
SGSSSNIGSKYVS

SEQ ID NO: 107 - protein, 13 aa, synthetic construct
SGSSFNIGNNYVS

SEQ ID NO: 108 - protein, 13 aa, synthetic construct
SGSSSNIGNTYVS

SEQ ID NO: 109 - protein, 13 aa, synthetic construct
SGSSSNIGDNHVS

SEQ ID NO: 110 - protein, 13 aa, synthetic construct
SGSSSNIGNNHVS

SEQ ID NO: 111 - protein, 13 aa, synthetic construct
SGSTSNIGNNDVS

SEQ ID NO: 112 - protein, 13 aa, synthetic construct
SGSRSNVGNNYVS

SEQ ID NO: 113 - protein, 13 aa, synthetic construct
SGGTSNIGKNYVS

SEQ ID NO: 114 - protein, 13 aa, synthetic construct
SGSSSNIADNYVS

SEQ ID NO: 115 - protein, 13 aa, synthetic construct
SGSSSNIGANYVS

SEQ ID NO: 116 - protein, 13 aa, synthetic construct
SGSSSNIGSNYVA

SEQ ID NO: 117 - protein, 13 aa, synthetic construct
SGSSSNIGNNFLS

SEQ ID NO: 118 - protein, 13 aa, synthetic construct
SGRSSNIGKNYVS

SEQ ID NO: 119 - protein, 13 aa, synthetic construct
SGSSPNIGANYVS

SEQ ID NO: 120 - protein, 13 aa, synthetic construct
SGSSSNIGPNYVS

SEQ ID NO: 121 - protein, 13 aa, synthetic construct
SGSSSTIGNNYIS

SEQ ID NO: 122 - protein, 13 aa, synthetic construct
SGSSSNIGNYFVS

SEQ ID NO: 123 - protein, 13 aa, synthetic construct
SGSRSNIGNNFVS

SEQ ID NO: 124 - protein, 13 aa, synthetic construct
SGGSSNIGSNFVS

SEQ ID NO: 125 - protein, 13 aa, synthetic construct
SGSSSNIGYNYVS

SEQ ID NO: 126 - protein, 13 aa, synthetic construct
SGTSSNIENNYVS

SEQ ID NO: 127 - protein, 13 aa, synthetic construct
SGSSSNIGNYYVS

SEQ ID NO: 128 - protein, 13 aa, synthetic construct
SGSTSNIGKNYVS

SEQ ID NO: 129 - protein, 13 aa, synthetic construct
SGSSSNIGTYYVS

SEQ ID NO: 130 - protein, 13 aa, synthetic construct
SGSSSNVGKNYVS

SEQ ID NO: 131 - protein, 13 aa, synthetic construct
SGSTSNIGDNFVS

SEQ ID NO: 132 - protein, 13 aa, synthetic construct
SGSTSNIGTNYVS

SEQ ID NO: 133 - protein, 13 aa, synthetic construct
SGGTSNIGNNYVS

SEQ ID NO: 134 - protein, 13 aa, synthetic construct
SGSYSNIGNNYVS

SEQ ID NO: 135 - protein, 13 aa, synthetic construct
SGSSSNIEDNYVS

SEQ ID NO: 136 - protein, 13 aa, synthetic construct
SGSSSNIGKHYVS

SEQ ID NO: 137 - protein, 13 aa, synthetic construct
SGSGSNIGSNYVS

SEQ ID NO: 138 - protein, 13 aa, synthetic construct
SGSSSNIGNNYIS

SEQ ID NO: 139 - protein, 13 aa, synthetic construct
SGASSNIGNNYVS

SEQ ID NO: 140 - protein, 13 aa, synthetic construct
SGRTSNIGNNYVS

SEQ ID NO: 141 - protein, 13 aa, synthetic construct
SGGSSNIGSNYVS

SEQ ID NO: 142 - protein, 13 aa, synthetic construct
SGSGSNIGNNYVS

SEQ ID NO: 143 - protein, 13 aa, synthetic construct
SGSTSNIGSNYVS

SEQ ID NO: 144 - protein, 13 aa, synthetic construct
SGSSSSIGNNYVA

SEQ ID NO: 145 - protein, 13 aa, synthetic construct
SGSSSNLGNNYVS

SEQ ID NO: 146 - protein, 13 aa, synthetic construct
SGTSSNIGKNYVS

SEQ ID NO: 147 - protein, 13 aa, synthetic construct
SGSSSDIGNKYIS

SEQ ID NO: 148 - protein, 13 aa, synthetic construct
SGSSSNIGSNYIS

SEQ ID NO: 149 - protein, 13 aa, synthetic construct
SGSTSNIGANYVS

SEQ ID NO: 150 - protein, 13 aa, synthetic construct
SGSSSNIGNKYVS

SEQ ID NO: 151 - protein, 13 aa, synthetic construct
SGSSSNIGNNYGS

SEQ ID NO: 152 - protein, 13 aa, synthetic construct
SGSTSNIANNYVS

SEQ ID NO: 153 - protein, 13 aa, synthetic construct
SGSYSNIGSNYVS

SEQ ID NO: 154 - protein, 13 aa, synthetic construct
SGSSSNIGSNFVS

SEQ ID NO: 155 - protein, 13 aa, synthetic construct
SGSSSNLENNYVS

SEQ ID NO: 156 - protein, 13 aa, synthetic construct
SGSISNIGSNYVS

SEQ ID NO: 157 - protein, 13 aa, synthetic construct
SGSSSDIGSNYVS

SEQ ID NO: 158 - protein, 13 aa, synthetic construct
SGSSSNIGTNYVS

SEQ ID NO: 159 - protein, 13 aa, synthetic construct
SGSSSNIGKNFVS

SEQ ID NO: 160 - protein, 13 aa, synthetic construct
SGSSSNIGNNFIS

SEQ ID NO: 161 - protein, 13 aa, synthetic construct
SGGSSNIGNNYVS

SEQ ID NO: 162 - protein, 13 aa, synthetic construct
SGSSSNIGENYVS

SEQ ID NO: 163 - protein, 13 aa, synthetic construct
SGSSSNIGNNFVA

SEQ ID NO: 164 - protein, 13 aa, synthetic construct
SGGSSNIGNNYVA

SEQ ID NO: 165 - protein, 13 aa, synthetic construct
SGSSSHIGNNYVS

SEQ ID NO: 166 - protein, 13 aa, synthetic construct
SGSSSNIGSNDVS

SEQ ID NO: 167 - protein, 13 aa, synthetic construct
SGSSSNIGNNYVT

SEQ ID NO: 168 - protein, 13 aa, synthetic construct
SGSSSNIGNNPVS

SEQ ID NO: 169 - protein, 13 aa, synthetic construct
SGGSSNIGNHYVS

SEQ ID NO: 170 - protein, 13 aa, synthetic construct
SGTSSNIGNNYVS

SEQ ID NO: 171 - protein, 13 aa, synthetic construct
SGSSSNIGSNYVS

SEQ ID NO: 172 - protein, 13 aa, synthetic construct
SGGTSNIGSNYVS

SEQ ID NO: 173 - protein, 13 aa, synthetic construct
SGSKSNIGNNYVS

SEQ ID NO: 174 - protein, 13 aa, synthetic construct
SGRSSNIGNNYVS

SEQ ID NO: 175 - protein, 13 aa, synthetic construct
SGSSSNVGSNYVS

SEQ ID NO: 176 - protein, 13 aa, synthetic construct
SGSTSNIGNNFVS

SEQ ID NO: 177 - protein, 13 aa, synthetic construct
SGSNFNIGNNYVS

SEQ ID NO: 178 - protein, 13 aa, synthetic construct
SGSTSNIGYNYVS

SEQ ID NO: 179 - protein, 13 aa, synthetic construct
SGSSSNIVSNYVS

SEQ ID NO: 180 - protein, 13 aa, synthetic construct
SGTSSNIGNNFVS

SEQ ID NO: 181 - protein, 13 aa, synthetic construct
SGSSSNIGRNFVS

SEQ ID NO: 182 - protein, 13 aa, synthetic construct
SGTTSNIGNNYVS

SEQ ID NO: 183 - protein, 13 aa, synthetic construct
SGSSSNIGNNDVS

SEQ ID NO: 184 - protein, 13 aa, synthetic construct
SGSSSNIGNHDVS

SEQ ID NO: 185 - protein, 13 aa, synthetic construct
SGSSSNIGSSHVS

SEQ ID NO: 186 - protein, 13 aa, synthetic construct
SGSSSNIGIHYVS

SEQ ID NO: 187 - protein, 13 aa, synthetic construct
SGGGSNIGYNYVS

SEQ ID NO: 188 - protein, 13 aa, synthetic construct
SGSSSNIGDHYVS

SEQ ID NO: 189 - protein, 13 aa, synthetic construct
SGSSSNLGKNYVS

SEQ ID NO: 190 - protein, 13 aa, synthetic construct
SGSSSNIGDNFVS

SEQ ID NO: 191 - protein, 13 aa, synthetic construct
SGSTSNIEKNYVS

SEQ ID NO: 192 - protein, 13 aa, synthetic construct
SGSSSNIGKDYVS

SEQ ID NO: 193 - protein, 13 aa, synthetic construct
SGSSSNIGKNYVS

SEQ ID NO: 194 - protein, 13 aa, synthetic construct
SGSSSNIGNNYVS

SEQ ID NO: 195 - protein, 13 aa, synthetic construct
SGSSSNIGNNYAS

SEQ ID NO: 196 - protein, 13 aa, synthetic construct
SGISSNIGNNYVS

SEQ ID NO: 197 - protein, 13 aa, synthetic construct
TGSSSNIGNNYVS

SEQ ID NO: 198 - protein, 13 aa, synthetic construct
SGTSSNIGNNHVS

SEQ ID NO: 199 - protein, 13 aa, synthetic construct
SGSRSNIGKNYVS

SEQ ID NO: 200 - DNA, 39 bp, synthetic construct
  source 1..39: mol_type = other DNA
tctggaagcagctccaacattgggagtaatcatgtatcc

SEQ ID NO: 201 - DNA, 39 bp, synthetic construct
  source 1..39: mol_type = other DNA
tctggaagcagctccaacattgggaataattatctatcc

SEQ ID NO: 202 - DNA, 39 bp, synthetic construct
  source 1..39: mol_type = other DNA
tctggaagcagctccaacattgcgaataattatgtatcc

SEQ ID NO: 203 - DNA, 39 bp, synthetic construct
  source 1..39: mol_type = other DNA
tctggaagcagccccaacattgggaataattatgtatcg

SEQ ID NO: 204 - DNA, 39 bp, synthetic construct
  source 1..39: mol_type = other DNA
tctggaagcagatccaatattgggagtaattatgtttcg

SEQ ID NO: 205 - DNA, 39 bp, synthetic construct
  source 1..39: mol_type = other DNA
tctggaagcagctccaacgttggcgataattatgtttcc

SEQ ID NO: 206 - DNA, 39 bp, synthetic construct
  source 1..39: mol_type = other DNA
tctggaagcagctccaacattgggattcaatatgtatcc

SEQ ID NO: 207 - DNA, 39 bp, synthetic construct
  source 1..39: mol_type = other DNA
tctggaagcagctccaatgttggtaacaattttgtctcc

SEQ ID NO: 208 - DNA, 39 bp, synthetic construct
  source 1..39: mol_type = other DNA
tctggaagcgcctccaacattgggaataattatgtatcc

SEQ ID NO: 209 - DNA, 39 bp, synthetic construct
  source 1..39: mol_type = other DNA
tctggaagcggctccaatattgggaataatgatgtgtcc

SEQ ID NO: 210 - DNA, 39 bp, synthetic construct
  source 1..39: mol_type = other DNA
tctggaagcatctccaacattggtaataattatgtatcc

SEQ ID NO: 211 - DNA, 39 bp, synthetic construct
  source 1..39: mol_type = other DNA
tctggaagcatctccaacattgggaaaaattatgtgtcg

SEQ ID NO: 212 - DNA, 39 bp, synthetic construct
  source 1..39: mol_type = other DNA
tctggaagcagctccaacattgggcataattatgtatcg

SEQ ID NO: 213 - DNA, 39 bp, synthetic construct
  source 1..39: mol_type = other DNA
cctggaagcagctccaacattgggaataattatgtatcc

SEQ ID NO: 214 - DNA, 39 bp, synthetic construct
  source 1..39: mol_type = other DNA
tctggaagcacctccaacattggaattcattatgtatcc

SEQ ID NO: 215 - DNA, 39 bp, synthetic construct
  source 1..39: mol_type = other DNA
tctggaagcagctccaacattggcagtcattatgtttcc

SEQ ID NO: 216 - DNA, 39 bp, synthetic construct
  source 1..39: mol_type = other DNA
tccggaagcagctccaacattggaaatgaatatgtatcc

SEQ ID NO: 217 - DNA, 39 bp, synthetic construct
  source 1..39: mol_type = other DNA
tctggaagcacctccaacattggaaataattatatatcg

SEQ ID NO: 218 - DNA, 39 bp, synthetic construct
  source 1..39: mol_type = other DNA
tctggaagcagctccaatattgggaatcattttgtatcg

SEQ ID NO: 219 - DNA, 39 bp, synthetic construct
  source 1..39: mol_type = other DNA
tctggaagcagctccaacattgggaataattatgtggcc

SEQ ID NO: 220 - DNA, 39 bp, synthetic construct
  source 1..39: mol_type = other DNA
tctggaagcagctccaacattggaagttattatgtatcc

SEQ ID NO: 221 - DNA, 39 bp, synthetic construct
  source 1..39: mol_type = other DNA
tctggaagtggtttcaacattgggaataattatgtctct

SEQ ID NO: 222 - DNA, 39 bp, synthetic construct
  source 1..39: mol_type = other DNA
tctggaagcacctccaacattgggaataattatgtgtcc

SEQ ID NO: 223 - DNA, 39 bp, synthetic construct
  source 1..39: mol_type = other DNA
tctggaagcagctccgacattggcaataattatgtatcc

SEQ ID NO: 224 - DNA, 39 bp, synthetic construct
  source 1..39: mol_type = other DNA
tctggaagcagctccaacattgggaataatgttgtatcc

SEQ ID NO: 225 - DNA, 39 bp, synthetic construct
  source 1..39: mol_type = other DNA
tctggaagcaagtctaacattgggaaaaattatgtatcc

SEQ ID NO: 226 - DNA, 39 bp, synthetic construct
  source 1..39: mol_type = other DNA
tctggaagcagcaccaacattgggaataattatgtatcc

SEQ ID NO: 227 - DNA, 39 bp, synthetic construct
  source 1..39: mol_type = other DNA
tctggaagcatctccaacattggggataattatgtatcc

SEQ ID NO: 228 - DNA, 39 bp, synthetic construct
  source 1..39: mol_type = other DNA
tctggaagcagctccaacattgggagtaaggatgtatca

SEQ ID NO: 229 - DNA, 39 bp, synthetic construct
  source 1..39: mol_type = other DNA
tctggaagcagctccaacattgagaataatgatgtatcg

SEQ ID NO: 230 - DNA, 39 bp, synthetic construct
  source 1..39: mol_type = other DNA
tctggaagcagctccaacattgggaatcattatgtatcc

SEQ ID NO: 231 - DNA, 39 bp, synthetic construct
  source 1..39: mol_type = other DNA
tctggaagcagctccaacattgggaaggattttgtctcc

SEQ ID NO: 232 - DNA, 39 bp, synthetic construct
  source 1..39: mol_type = other DNA
tctggcagtacttccaacatcggaagtaattttgtttcc

SEQ ID NO: 233 - DNA, 39 bp, synthetic construct
  source 1..39: mol_type = other DNA
tctggaagcacctccaacattgggcataattatgtatcc

SEQ ID NO: 234 - DNA, 39 bp, synthetic construct
  source 1..39: mol_type = other DNA
tctgcaagcagctccaacattgggaataattatgtatcc

SEQ ID NO: 235 - DNA, 39 bp, synthetic construct
  source 1..39: mol_type = other DNA
tctggaagcagctccagcattggcaataattatgtatcc

SEQ ID NO: 236 - DNA, 39 bp, synthetic construct
  source 1..39: mol_type = other DNA
tctggaagcagctccaccattgggaataattatgtatcc

SEQ ID NO: 237 - DNA, 39 bp, synthetic construct
  source 1..39: mol_type = other DNA
tctggaagcagctccaacattgaaaataattatgtatcc

SEQ ID NO: 238 - DNA, 39 bp, synthetic construct
  source 1..39: mol_type = other DNA
tctggaagcagctccaacattgggaatcagtatgtatcc

SEQ ID NO: 239 - DNA, 39 bp, synthetic construct
  source 1..39: mol_type = other DNA
tctggaagcagctccaacattgggaataattatgtattc

SEQ ID NO: 240 - DNA, 39 bp, synthetic construct
  source 1..39: mol_type = other DNA
tctggaagcagctccaacattgggaggaattatgtctcc

SEQ ID NO: 241 - DNA, 39 bp, synthetic construct
  source 1..39: mol_type = other DNA
tctggaggcagctccaacattggaaattattatgtatcg

SEQ ID NO: 242 - DNA, 39 bp, synthetic construct
  source 1..39: mol_type = other DNA
tctggaagcagctccaacattggagataattatgtctcc

SEQ ID NO: 243 - DNA, 39 bp, synthetic construct
  source 1..39: mol_type = other DNA
tctggaggcagctccaacattggaattaattatgtatcc

SEQ ID NO: 244 - DNA, 39 bp, synthetic construct
  source 1..39: mol_type = other DNA
tctggaggcagctccaacattgggaagaattatgtatcc

SEQ ID NO: 245 - DNA, 39 bp, synthetic construct
  source 1..39: mol_type = other DNA
tctggaagcagctccaacattgggaagagatctgtatcg

SEQ ID NO: 246 - DNA, 39 bp, synthetic construct
  source 1..39: mol_type = other DNA
tctggaagcagatccaacattgggaataactatgtatcc

SEQ ID NO: 247 - DNA, 39 bp, synthetic construct
  source 1..39: mol_type = other DNA
tcgggaagcagctccaacattgggaataatcttgtttcc

SEQ ID NO: 248 - DNA, 39 bp, synthetic construct
  source 1..39: mol_type = other DNA
tctggaagcagctccaacattgggatcaattatgtatcc

SEQ ID NO: 249 - DNA, 39 bp, synthetic construct
  source 1..39: mol_type = other DNA
tctggaagcagctccaacatcgggaataattttgtatcc

SEQ ID NO: 250 - DNA, 39 bp, synthetic construct
  source 1..39: mol_type = other DNA
tctggaaccagctccaacattggcagaaattttgtatcc

SEQ ID NO: 251 - DNA, 39 bp, synthetic construct
  source 1..39: mol_type = other DNA
tctggaaggaggtccaacattggaaataattatgtgtcc

SEQ ID NO: 252 - DNA, 39 bp, synthetic construct
  source 1..39: mol_type = other DNA
tctggaggcagcttcaatattgggaataattatgtatcc

SEQ ID NO: 253 - DNA, 39 bp, synthetic construct
  source 1..39: mol_type = other DNA
tctggaagcacttccaacattggggagaattatgtgtcc

SEQ ID NO: 254 - DNA, 39 bp, synthetic construct
  source 1..39: mol_type = other DNA
tctggaagcagctccaatattgggagtgattatgtatcc

SEQ ID NO: 255 - DNA, 39 bp, synthetic construct
  source 1..39: mol_type = other DNA
tctggaaccagctccaacattgggagtaattatgtatcc

SEQ ID NO: 256 - DNA, 39 bp, synthetic construct
  source 1..39: mol_type = other DNA
tctggaagcagctccaacattgggactaattttgtatcc

SEQ ID NO: 257 - DNA, 39 bp, synthetic construct
  source 1..39: mol_type = other DNA
tctggaagcagctccaactttgggaataattatgtatcc

SEQ ID NO: 258 - DNA, 39 bp, synthetic construct
  source 1..39: mol_type = other DNA
tctggaagcacctccaacattgggaataatcatgtatcc

SEQ ID NO: 259 - DNA, 39 bp, synthetic construct
  source 1..39: mol_type = other DNA
tctggaagcagctccaacattgggaatgattttgtatcc

SEQ ID NO: 260 - DNA, 39 bp, synthetic construct
  source 1..39: mol_type = other DNA
tctggaagcagctccgacattggcgataattatgtgtcc

SEQ ID NO: 261 - DNA, 39 bp, synthetic construct
  source 1..39: mol_type = other DNA
tctggaagcagctccaacattgggaaatattatgtatcc

SEQ ID NO: 262 - DNA, 39 bp, synthetic construct
  source 1..39: mol_type = other DNA
tctggaagcagctccaacattggcggtaattatgtatcc

SEQ ID NO: 263 - DNA, 39 bp, synthetic construct
  source 1..39: mol_type = other DNA
tctggaagcagctccaacactgggaataattatgtatcc

SEQ ID NO: 264 - DNA, 39 bp, synthetic construct
  source 1..39: mol_type = other DNA
tctggaagcagctccaacgttgggaataattatgtgtct

SEQ ID NO: 265 - DNA, 39 bp, synthetic construct
  source 1..39: mol_type = other DNA
tctggaagcagctccaacattgcgaataattttgtatcc

SEQ ID NO: 266 - DNA, 39 bp, synthetic construct
  source 1..39: mol_type = other DNA
tctggaagcagctccaacattgggaatgattatgtatcc

SEQ ID NO: 267 - DNA, 39 bp, synthetic construct
  source 1..39: mol_type = other DNA
tctggaagcacctccaatattgagaataattatgtttcc

SEQ ID NO: 268 - DNA, 39 bp, synthetic construct
  source 1..39: mol_type = other DNA
tctggaggcagctccaatattggcaataatgatgtgtcc

SEQ ID NO: 269 - DNA, 39 bp, synthetic construct
  source 1..39: mol_type = other DNA
tctggaagcacctccaacattgggaatcattatgtatcc

SEQ ID NO: 270 - DNA, 39 bp, synthetic construct
  source 1..39: mol_type = other DNA
tcaggaagcagctccaatattggggataatgatgtatcc

SEQ ID NO: 271 - DNA, 39 bp, synthetic construct
  source 1..39: mol_type = other DNA
tctggatacagctccaacattgggaataattatgtatcc

SEQ ID NO: 272 - DNA, 39 bp, synthetic construct
  source 1..39: mol_type = other DNA
tctggaagcggctccaacattggaaataattttgtatcc

SEQ ID NO: 273 - DNA, 39 bp, synthetic construct
  source 1..39: mol_type = other DNA
tctggaagcagctccaacatttggaataattatgtatcc

SEQ ID NO: 274 - DNA, 39 bp, synthetic construct
  source 1..39: mol_type = other DNA
tttggaagcagctccaacattgggaataattatgtatcc

SEQ ID NO: 275 - DNA, 39 bp, synthetic construct
  source 1..39: mol_type = other DNA
tctggaagcagctccaacattgagaagaattatgtatcc

SEQ ID NO: 276 - DNA, 39 bp, synthetic construct
  source 1..39: mol_type = other DNA
tctggaagtagatccaatattggaaattattatgtatcc

SEQ ID NO: 277 - DNA, 39 bp, synthetic construct
  source 1..39: mol_type = other DNA
tctggaaccaagtcaaacattgggaataattatgtatct

SEQ ID NO: 278 - DNA, 39 bp, synthetic construct
  source 1..39: mol_type = other DNA
tctggaagcacctccaacattgggaattattatgtatcc

SEQ ID NO: 279 - DNA, 39 bp, synthetic construct
  source 1..39: mol_type = other DNA
tctggaaccagctccaacattgggaataattatgtggcc

SEQ ID NO: 280 - DNA, 39 bp, synthetic construct
  source 1..39: mol_type = other DNA
cctggaaccagctccaacattgggaataattatgtatcc

SEQ ID NO: 281 - DNA, 39 bp, synthetic construct
  source 1..39: mol_type = other DNA
tccggaagcacctccaacattgggattaattatgtatcc

SEQ ID NO: 282 - DNA, 39 bp, synthetic construct
  source 1..39: mol_type = other DNA
tctggaagcagctccaacattgggagtaatctggtatcc

SEQ ID NO: 283 - DNA, 39 bp, synthetic construct
  source 1..39: mol_type = other DNA
tctggaagcagctccaacattgagaataatcatgtatcc

SEQ ID NO: 284 - DNA, 39 bp, synthetic construct
  source 1..39: mol_type = other DNA
tctggaaccaggtccaacatcggcaataattatgtttcg

SEQ ID NO: 285 - DNA, 39 bp, synthetic construct
  source 1..39: mol_type = other DNA
tctggaagcacctccaacattggggacaattatgtttcc

SEQ ID NO: 286 - DNA, 39 bp, synthetic construct
  source 1..39: mol_type = other DNA
tctggaggcagttccaacattgggaagaattttgtatcc

SEQ ID NO: 287 - DNA, 39 bp, synthetic construct
  source 1..39: mol_type = other DNA
tctggaagcaggtccgacattgggaataattatgtatcc

SEQ ID NO: 288 - DNA, 39 bp, synthetic construct
  source 1..39: mol_type = other DNA
tctggaactagctccaacattgggaataatgatgtatcc

SEQ ID NO: 289 - DNA, 39 bp, synthetic construct
  source 1..39: mol_type = other DNA
tctggaagcagctccaacattgggagtaaatatgtatca

SEQ ID NO: 290 - DNA, 39 bp, synthetic construct
  source 1..39: mol_type = other DNA
tctggaagcagcttcaacattgggaataattatgtatcc

SEQ ID NO: 291 - DNA, 39 bp, synthetic construct
  source 1..39: mol_type = other DNA
tctggaagcagctccaacattgggaatacttatgtatcc

SEQ ID NO: 292 - DNA, 39 bp, synthetic construct
  source 1..39: mol_type = other DNA
tctggaagcagctccaatattggggataatcatgtatcc

SEQ ID NO: 293 - DNA, 39 bp, synthetic construct
  source 1..39: mol_type = other DNA
tctggaagcagctccaacattggcaataatcatgtttcc

SEQ ID NO: 294 - DNA, 39 bp, synthetic construct
  source 1..39: mol_type = other DNA
tctggaagcacctccaacattgggaataatgatgtatcc

SEQ ID NO: 295 - DNA, 39 bp, synthetic construct
  source 1..39: mol_type = other DNA
tctggaagcagatccaacgttggcaataattatgtttca

SEQ ID NO: 296 - DNA, 39 bp, synthetic construct
  source 1..39: mol_type = other DNA
tccggaggcacctccaacattgggaagaattatgtgtct

SEQ ID NO: 297 - DNA, 39 bp, synthetic construct
  source 1..39: mol_type = other DNA
tctggaagcagctccaacattgccgataattatgtttcc

SEQ ID NO: 298 - DNA, 39 bp, synthetic construct
  source 1..39: mol_type = other DNA
tctggaagcagctccaacattggcgccaattatgtatcc

SEQ ID NO: 299 - DNA, 39 bp, synthetic construct
  source 1..39: mol_type = other DNA
tctggaagcagctccaacattgggagtaattatgtggcc

SEQ ID NO: 300 - DNA, 39 bp, synthetic construct
  source 1..39: mol_type = other DNA
tctggaagcagctccaacattgggaacaattttctctcc

SEQ ID NO: 301 - DNA, 39 bp, synthetic construct
  source 1..39: mol_type = other DNA
tctggaagaagctccaacattgggaagaattatgtatcc

SEQ ID NO: 302 - DNA, 39 bp, synthetic construct
  source 1..39: mol_type = other DNA
tctggaagcagccccaacattggggctaattatgtatcc

SEQ ID NO: 303 - DNA, 39 bp, synthetic construct
  source 1..39: mol_type = other DNA
tccggaagcagctccaacattgggcctaattatgtgtcc

SEQ ID NO: 304 - DNA, 39 bp, synthetic construct
  source 1..39: mol_type = other DNA
tctggaagcagctccaccattgggaataattatatatcc

SEQ ID NO: 305 - DNA, 39 bp, synthetic construct
  source 1..39: mol_type = other DNA
tctggaagcagctccaacattgggaattattttgtatcc

SEQ ID NO: 306 - DNA, 39 bp, synthetic construct
  source 1..39: mol_type = other DNA
tctggaagccgctccaacattggtaataattttgtatcc

SEQ ID NO: 307 - DNA, 39 bp, synthetic construct
  source 1..39: mol_type = other DNA
tctggaggcagctccaacattgggagtaattttgtatcc

SEQ ID NO: 308 - DNA, 39 bp, synthetic construct
  source 1..39: mol_type = other DNA
tctggaagcagctccaacattgggtataattatgtatcc

SEQ ID NO: 309 - DNA, 39 bp, synthetic construct
  source 1..39: mol_type = other DNA
tctggaaccagctcgaacattgagaacaattatgtatcc

SEQ ID NO: 310 - DNA, 39 bp, synthetic construct
  source 1..39: mol_type = other DNA
tctggaagtagctccaacattgggaattattatgtatcc

SEQ ID NO: 311 - DNA, 39 bp, synthetic construct
  source 1..39: mol_type = other DNA
tctggaagcacctccaacattgggaagaattatgtatcc

SEQ ID NO: 312 - DNA, 39 bp, synthetic construct
  source 1..39: mol_type = other DNA
tctggaagcagttccaacattgggacttattatgtctct

SEQ ID NO: 313 - DNA, 39 bp, synthetic construct
  source 1..39: mol_type = other DNA
tctggaagcagctccaacgttgggaaaaattatgtatct

SEQ ID NO: 314 - DNA, 39 bp, synthetic construct
  source 1..39: mol_type = other DNA
tctggaagcacctccaacattggggataattttgtatcc

SEQ ID NO: 315 - DNA, 39 bp, synthetic construct
  source 1..39: mol_type = other DNA
tctggaagcacctccaacattggaactaattatgtttcc

SEQ ID NO: 316 - DNA, 39 bp, synthetic construct
  source 1..39: mol_type = other DNA
tctggaggtacttccaacattgggaataattatgtctcc

SEQ ID NO: 317 - DNA, 39 bp, synthetic construct
  source 1..39: mol_type = other DNA
tctggaagctactccaatattgggaataattatgtatcc

SEQ ID NO: 318 - DNA, 39 bp, synthetic construct
  source 1..39: mol_type = other DNA
tctggaagcagctccaacattgaagataattatgtatcc

SEQ ID NO: 319 - DNA, 39 bp, synthetic construct
  source 1..39: mol_type = other DNA
tctggaagcagctccaacattgggaaacattatgtatcc

SEQ ID NO: 320 - DNA, 39 bp, synthetic construct
  source 1..39: mol_type = other DNA
tccggttccggctcaaacattggaagtaattatgtctcc

SEQ ID NO: 321 - DNA, 39 bp, synthetic construct
  source 1..39: mol_type = other DNA
tctggaagcagctccaacattggaaataattatatatca

SEQ ID NO: 322 - DNA, 39 bp, synthetic construct
  source 1..39: mol_type = other DNA
tctggagccagttccaacattgggaataattatgtttcc

SEQ ID NO: 323 - DNA, 39 bp, synthetic construct
  source 1..39: mol_type = other DNA
tctggacgcacctccaacatcgggaacaattatgtatcc

SEQ ID NO: 324 - DNA, 39 bp, synthetic construct
  source 1..39: mol_type = other DNA
tctggaggcagctccaatattgggagtaattacgtatcc

SEQ ID NO: 325 - DNA, 39 bp, synthetic construct
  source 1..39: mol_type = other DNA
tctggaagcggctccaacattgggaataattatgtatcc

SEQ ID NO: 326 - DNA, 39 bp, synthetic construct
  source 1..39: mol_type = other DNA
tctggaagcacctccaacattgggagtaattatgtatcc

SEQ ID NO: 327 - DNA, 39 bp, synthetic construct
  source 1..39: mol_type = other DNA
tctggaagcagctccagcattgggaataattatgtggcg

SEQ ID NO: 328 - DNA, 39 bp, synthetic construct
  source 1..39: mol_type = other DNA
tctggaagcagttccaaccttggaaataattatgtatcc

SEQ ID NO: 329 - DNA, 39 bp, synthetic construct
  source 1..39: mol_type = other DNA
tctggaaccagctccaacattgggaaaaattatgtatcc

SEQ ID NO: 330 - DNA, 39 bp, synthetic construct
  source 1..39: mol_type = other DNA
tctggaagcagctccgatattgggaacaagtatatatcc

SEQ ID NO: 331 - DNA, 39 bp, synthetic construct
  source 1..39: mol_type = other DNA
tctggaagcagctccaacattggaagtaattacatatcc

SEQ ID NO: 332 - DNA, 39 bp, synthetic construct
  source 1..39: mol_type = other DNA
tctggaagcacctccaacattggggctaactatgtgtcc

SEQ ID NO: 333 - DNA, 39 bp, synthetic construct
  source 1..39: mol_type = other DNA
tctggaagcagctccaacattgggaataagtatgtatcc

SEQ ID NO: 334 - DNA, 39 bp, synthetic construct
  source 1..39: mol_type = other DNA
tctggaagcagctccaacattgggaataattatggatcc

SEQ ID NO: 335 - DNA, 39 bp, synthetic construct
  source 1..39: mol_type = other DNA
tctggaagcacctccaacattgcgaataattatgtatcc

SEQ ID NO: 336 - DNA, 39 bp, synthetic construct
  source 1..39: mol_type = other DNA
tctggaagctactccaatattgggagtaattatgtatcc

SEQ ID NO: 337 - DNA, 39 bp, synthetic construct
  source 1..39: mol_type = other DNA
tctggaagcagctccaacattgggagtaattttgtatcc

SEQ ID NO: 338 - DNA, 39 bp, synthetic construct
  source 1..39: mol_type = other DNA
tctggaagcagctccaatcttgagaataattatgtatcc

SEQ ID NO: 339 - DNA, 39 bp, synthetic construct
  source 1..39: mol_type = other DNA
tctggaagcatctccaatattggcagtaattatgtatcc

SEQ ID NO: 340 - DNA, 39 bp, synthetic construct
  source 1..39: mol_type = other DNA
tctggaagcagctccgacattgggagtaattatgtatcc

SEQ ID NO: 341 - DNA, 39 bp, synthetic construct
  source 1..39: mol_type = other DNA
tctggaagcagctccaacattgggactaattatgtatcc

SEQ ID NO: 342 - DNA, 39 bp, synthetic construct
  source 1..39: mol_type = other DNA
tctggaagcagctccaacattgggaagaattttgtatcc

SEQ ID NO: 343 - DNA, 39 bp, synthetic construct
  source 1..39: mol_type = other DNA
tctggaagcagctccaacattgggaataattttatatcc

SEQ ID NO: 344 - DNA, 39 bp, synthetic construct
  source 1..39: mol_type = other DNA
tctggaggcagctccaacattggcaataattatgtttcc

SEQ ID NO: 345 - DNA, 39 bp, synthetic construct
  source 1..39: mol_type = other DNA
tctggaagcagctccaacattggggagaattatgtatcc

SEQ ID NO: 346 - DNA, 39 bp, synthetic construct
  source 1..39: mol_type = other DNA
tctggaagcagctccaatattgggaataattttgtggcc

SEQ ID NO: 347 - DNA, 39 bp, synthetic construct
  source 1..39: mol_type = other DNA
tctggaggcagctccaacattgggaataattatgtagcc

SEQ ID NO: 348 - DNA, 39 bp, synthetic construct
  source 1..39: mol_type = other DNA
tctggaagcagctcccacattggaaataattatgtatcc

SEQ ID NO: 349 - DNA, 39 bp, synthetic construct
  source 1..39: mol_type = other DNA
tctggaagcagctccaatattggaagtaatgatgtatcg

SEQ ID NO: 350 - DNA, 39 bp, synthetic construct
  source 1..39: mol_type = other DNA
tctggaagcagctccaacattgggaataattatgtaacc

SEQ ID NO: 351 - DNA, 39 bp, synthetic construct
  source 1..39: mol_type = other DNA
tctggaagcagctccaacattgggaataatcctgtatcc

SEQ ID NO: 352 - DNA, 39 bp, synthetic construct
  source 1..39: mol_type = other DNA
tctggaggcagctccaatattgggaatcattatgtatcc

SEQ ID NO: 353 - DNA, 39 bp, synthetic construct
  source 1..39: mol_type = other DNA
tctggaaccagctccaacattgggaataattatgtatcc

SEQ ID NO: 354 - DNA, 39 bp, synthetic construct
  source 1..39: mol_type = other DNA
tctggaagcagctccaacattggaagtaattatgtctcg

SEQ ID NO: 355 - DNA, 39 bp, synthetic construct
  source 1..39: mol_type = other DNA
tctggaggcacctccaacattggaagtaattatgtatcc

SEQ ID NO: 356 - DNA, 39 bp, synthetic construct
  source 1..39: mol_type = other DNA
tctggaagcaagtccaacattgggaataattatgtatcc

SEQ ID NO: 357 - DNA, 39 bp, synthetic construct
  source 1..39: mol_type = other DNA
tctggaagaagctccaacattgggaataattatgtatcg

SEQ ID NO: 358 - DNA, 39 bp, synthetic construct
  source 1..39: mol_type = other DNA
tctggaagcagctccaacgttgggagtaattatgtttcc

SEQ ID NO: 359 - DNA, 39 bp, synthetic construct
  source 1..39: mol_type = other DNA
tctggaagcacctccaatattgggaataattttgtatcc

SEQ ID NO: 360 - DNA, 39 bp, synthetic construct
  source 1..39: mol_type = other DNA
tctggaagcaacttcaacattgggaataattatgtctcc

SEQ ID NO: 361 - DNA, 39 bp, synthetic construct
  source 1..39: mol_type = other DNA
tctggaagcacctccaatattggatataattatgtatcc

SEQ ID NO: 362 - DNA, 39 bp, synthetic construct
  source 1..39: mol_type = other DNA
tctggaagcagctccaatattgtaagtaattatgtatcc

SEQ ID NO: 363 - DNA, 39 bp, synthetic construct
  source 1..39: mol_type = other DNA
tctggaaccagctccaacattgggaataattttgtatcc

SEQ ID NO: 364 - DNA, 39 bp, synthetic construct
  source 1..39: mol_type = other DNA
tctggaagcagctccaacattgggaggaattttgtgtcc

SEQ ID NO: 365 - DNA, 39 bp, synthetic construct
  source 1..39: mol_type = other DNA
tctggaacgacctccaacattgggaataattatgtctcc

SEQ ID NO: 366 - DNA, 39 bp, synthetic construct
  source 1..39: mol_type = other DNA
tctggaagcagctccaacattgggaataatgatgtatcc

SEQ ID NO: 367 - DNA, 39 bp, synthetic construct
  source 1..39: mol_type = other DNA
tctggaagcagctccaacattgggaatcatgatgtatcc

SEQ ID NO: 368 - DNA, 39 bp, synthetic construct
  source 1..39: mol_type = other DNA
tctggaagcagctccaacattggaagtagtcatgtatcc

SEQ ID NO: 369 - DNA, 39 bp, synthetic construct
  source 1..39: mol_type = other DNA
tctggaagcagctccaacattgggattcattatgtatcc

SEQ ID NO: 370 - DNA, 39 bp, synthetic construct
  source 1..39: mol_type = other DNA
tctggaggcggctccaacattggctataattatgtctcc

SEQ ID NO: 371 - DNA, 39 bp, synthetic construct
  source 1..39: mol_type = other DNA
tctggaagcagctccaacattggggatcattatgtgtcg

SEQ ID NO: 372 - DNA, 39 bp, synthetic construct
  source 1..39: mol_type = other DNA
tctggaagcagctccaaccttgggaagaattatgtatct

SEQ ID NO: 373 - DNA, 39 bp, synthetic construct
  source 1..39: mol_type = other DNA
tctggaagcagctccaacattggcgataattttgtatcc

SEQ ID NO: 374 - DNA, 39 bp, synthetic construct
  source 1..39: mol_type = other DNA
tctggaagcacctccaacattgagaaaaactatgtatcg

SEQ ID NO: 375 - DNA, 39 bp, synthetic construct
  source 1..39: mol_type = other DNA
tctggaagcagctccaacattgggaaggattatgtatcc

SEQ ID NO: 376 - DNA, 39 bp, synthetic construct
  source 1..39: mol_type = other DNA
tctggaagcagctccaacattgggaagaattatgtatcc

SEQ ID NO: 377 - DNA, 39 bp, synthetic construct
  source 1..39: mol_type = other DNA
tctggaagcagctccaacattgggaataattatgtatcc

SEQ ID NO: 378 - DNA, 39 bp, synthetic construct
  source 1..39: mol_type = other DNA
tctggaagcagctccaacattgggaataattatgcctcc

SEQ ID NO: 379 - DNA, 39 bp, synthetic construct
  source 1..39: mol_type = other DNA
tctggaatcagctccaacattgggaataattatgtatcc

SEQ ID NO: 380 - DNA, 39 bp, synthetic construct
  source 1..39: mol_type = other DNA
actggaagcagctccaacattgggaataattatgtatcc

SEQ ID NO: 381 - DNA, 39 bp, synthetic construct
  source 1..39: mol_type = other DNA
tctggaaccagctccaacattgggaataatcatgtttcc

SEQ ID NO: 382 - DNA, 39 bp, synthetic construct
  source 1..39: mol_type = other DNA
tctggaagtcgttccaacattgggaaaaattatgtatcc

SEQ ID NO: 383 - protein, 7 aa, synthetic construct
DNNKRPP

SEQ ID NO: 384 - protein, 7 aa, synthetic construct
ENNRRPS

SEQ ID NO: 385 - protein, 7 aa, synthetic construct
DNNKQPS

SEQ ID NO: 386 - protein, 7 aa, synthetic construct
DNNKRPL

SEQ ID NO: 387 - protein, 7 aa, synthetic construct
DNDKRPA

SEQ ID NO: 388 - protein, 7 aa, synthetic construct
DNHERPS

SEQ ID NO: 389 - protein, 7 aa, synthetic construct
ENRKRPS

SEQ ID NO: 390 - protein, 7 aa, synthetic construct
DNDQRPS

SEQ ID NO: 391 - protein, 7 aa, synthetic construct
ENYKRPS

SEQ ID NO: 392 - protein, 7 aa, synthetic construct
ENTKRPS

SEQ ID NO: 393 - protein, 7 aa, synthetic construct
DTEKRPS

SEQ ID NO: 394 - protein, 7 aa, synthetic construct
DNDKRPP

SEQ ID NO: 395 - protein, 7 aa, synthetic construct
DHNKRPS

SEQ ID NO: 396 - protein, 7 aa, synthetic construct
GNNERPS

SEQ ID NO: 397 - protein, 7 aa, synthetic construct
DTSKRPS

SEQ ID NO: 398 - protein, 7 aa, synthetic construct
EYNKRPS

SEQ ID NO: 399 - protein, 7 aa, synthetic construct
ENIKRPS

SEQ ID NO: 400 - protein, 7 aa, synthetic construct
DNVKRPS

SEQ ID NO: 401 - protein, 7 aa, synthetic construct
ENDKRSS

SEQ ID NO: 402 - protein, 7 aa, synthetic construct
ENNKRHS

SEQ ID NO: 403 - protein, 7 aa, synthetic construct
GNDQRPS

SEQ ID NO: 404 - protein, 7 aa, synthetic construct
DNDRRPS

SEQ ID NO: 405 - protein, 7 aa, synthetic construct
DNHKRPS

SEQ ID NO: 406 - protein, 7 aa, synthetic construct
DNNDRPS

SEQ ID NO: 407 - protein, 7 aa, synthetic construct
ENNQRPS

SEQ ID NO: 408 - protein, 7 aa, synthetic construct
DNNQRPS

SEQ ID NO: 409 - protein, 7 aa, synthetic construct
ENVKRPS

SEQ ID NO: 410 - protein, 7 aa, synthetic construct
DTYKRPS

SEQ ID NO: 411 - protein, 7 aa, synthetic construct
NNNNRPS

SEQ ID NO: 412 - protein, 7 aa, synthetic construct
GNNNRPS

SEQ ID NO: 413 - protein, 7 aa, synthetic construct
ENDQRPS

SEQ ID NO: 414 - protein, 7 aa, synthetic construct
DNNKRAS

SEQ ID NO: 415 - protein, 7 aa, synthetic construct
DNDKRPL

SEQ ID NO: 416 - protein, 7 aa, synthetic construct
DTDERPS

SEQ ID NO: 417 - protein, 7 aa, synthetic construct
DNRKRPS

SEQ ID NO: 418 - protein, 7 aa, synthetic construct
DNDARPS

SEQ ID NO: 419 - protein, 7 aa, synthetic construct
DNNKRLS

SEQ ID NO: 420 - protein, 7 aa, synthetic construct
DNDKRAS

SEQ ID NO: 421 - protein, 7 aa, synthetic construct
DNTERPS

SEQ ID NO: 422 - protein, 7 aa, synthetic construct
DNNIRPS

SEQ ID NO: 423 - protein, 7 aa, synthetic construct
DNKRRPS

SEQ ID NO: 424 - protein, 7 aa, synthetic construct
DDNNRPS

SEQ ID NO: 425 - protein, 7 aa, synthetic construct
ANNRRPS

SEQ ID NO: 426 - protein, 7 aa, synthetic construct
DNDKRLS

SEQ ID NO: 427 - protein, 7 aa, synthetic construct
DNNKRPA

SEQ ID NO: 428 - protein, 7 aa, synthetic construct
DNYRRPS

SEQ ID NO: 429 - protein, 7 aa, synthetic construct
ANDQRPS

SEQ ID NO: 430 - protein, 7 aa, synthetic construct
DNDKRRS

SEQ ID NO: 431 - protein, 7 aa, synthetic construct
DKNERPS

SEQ ID NO: 432 - protein, 7 aa, synthetic construct
DNKERPS

SEQ ID NO: 433 - protein, 7 aa, synthetic construct
DNNKGPS

SEQ ID NO: 434 - protein, 7 aa, synthetic construct
ENDRRPS

SEQ ID NO: 435 - protein, 7 aa, synthetic construct
ENDERPS

SEQ ID NO: 436 - protein, 7 aa, synthetic construct
QNNKRPS

SEQ ID NO: 437 - protein, 7 aa, synthetic construct
DNRERPS

SEQ ID NO: 438 - protein, 7 aa, synthetic construct
DNNRRPS

SEQ ID NO: 439 - protein, 7 aa, synthetic construct
GNNRRPS

SEQ ID NO: 440 - protein, 7 aa, synthetic construct
DNDNRPS

SEQ ID NO: 441 - protein, 7 aa, synthetic construct
EDNKRPS

SEQ ID NO: 442 - protein, 7 aa, synthetic construct
DDDERPS

SEQ ID NO: 443 - protein, 7 aa, synthetic construct
ASNKRPS

SEQ ID NO: 444 - protein, 7 aa, synthetic construct
DNNKRSS

SEQ ID NO: 445 - protein, 7 aa, synthetic construct
QNNERPS

SEQ ID NO: 446 - protein, 7 aa, synthetic construct
DDDRRPS

SEQ ID NO: 447 - protein, 7 aa, synthetic construct
NNDKRPS

SEQ ID NO: 448 - protein, 7 aa, synthetic construct
DNNNRPS

SEQ ID NO: 449 - protein, 7 aa, synthetic construct
DNNVRPS

SEQ ID NO: 450 - protein, 7 aa, synthetic construct
ENNERPS

SEQ ID NO: 451 - protein, 7 aa, synthetic construct
DNNHRPS

SEQ ID NO: 452 - protein, 7 aa, synthetic construct
DNDERPS

SEQ ID NO: 453 - protein, 7 aa, synthetic construct
DNIRRPS

SEQ ID NO: 454 - protein, 7 aa, synthetic construct
DFNKRPS

SEQ ID NO: 455 - protein, 7 aa, synthetic construct
ETNKRPS

SEQ ID NO: 456 - protein, 7 aa, synthetic construct
NDNKRPS

SEQ ID NO: 457 - protein, 7 aa, synthetic construct
DDNKRPS

SEQ ID NO: 458 - protein, 7 aa, synthetic construct
DNYKRPS

SEQ ID NO: 459 - protein, 7 aa, synthetic construct
HNNKRPS

SEQ ID NO: 460 - protein, 7 aa, synthetic construct
DNHQRPS

SEQ ID NO: 461 - protein, 7 aa, synthetic construct
DNYKRAS

SEQ ID NO: 462 - protein, 7 aa, synthetic construct
DNIKRPS

SEQ ID NO: 463 - protein, 7 aa, synthetic construct
DTHKRPS

SEQ ID NO: 464 - protein, 7 aa, synthetic construct
DTNRRPS

SEQ ID NO: 465 - protein, 7 aa, synthetic construct
DTNQRPS

SEQ ID NO: 466 - protein, 7 aa, synthetic construct
ESDKRPS

SEQ ID NO: 467 - protein, 7 aa, synthetic construct
DNDKRSS

SEQ ID NO: 468 - protein, 7 aa, synthetic construct
GSNKRPS

SEQ ID NO: 469 - protein, 7 aa, synthetic construct
DNNKRVS

SEQ ID NO: 470 - protein, 7 aa, synthetic construct
NNNRRPS

SEQ ID NO: 471 - protein, 7 aa, synthetic construct
DNFKRPS

SEQ ID NO: 472 - protein, 7 aa, synthetic construct
ENDKRPS

SEQ ID NO: 473 - protein, 7 aa, synthetic construct
ENNKRLS

SEQ ID NO: 474 - protein, 7 aa, synthetic construct
ADNKRPS

SEQ ID NO: 475 - protein, 7 aa, synthetic construct
EDNERPS

SEQ ID NO: 476 - protein, 7 aa, synthetic construct
DTDQRPS

SEQ ID NO: 477 - protein, 7 aa, synthetic construct
DNYQRPS

SEQ ID NO: 478 - protein, 7 aa, synthetic construct
DENKRPS

SEQ ID NO: 479 - protein, 7 aa, synthetic construct
DTNKRPS

SEQ ID NO: 480 - protein, 7 aa, synthetic construct
DDYRRPS

SEQ ID NO: 481 - protein, 7 aa, synthetic construct
DNDKRHS

SEQ ID NO: 482 - protein, 7 aa, synthetic construct
ENDNRPS

SEQ ID NO: 483 - protein, 7 aa, synthetic construct
DDNERPS

SEQ ID NO: 484 - protein, 7 aa, synthetic construct
DNKKRPS

SEQ ID NO: 485 - protein, 7 aa, synthetic construct
DVDKRPS

SEQ ID NO: 486 - protein, 7 aa, synthetic construct
ENKKRPS

SEQ ID NO: 487 - protein, 7 aa, synthetic construct
VNDKRPS

SEQ ID NO: 488 - protein, 7 aa, synthetic construct
DNDHRPS

SEQ ID NO: 489 - protein, 7 aa, synthetic construct
DINKRPS

SEQ ID NO: 490 - protein, 7 aa, synthetic construct
ANNERPS

SEQ ID NO: 491 - protein, 7 aa, synthetic construct
DNENRPS

SEQ ID NO: 492 - protein, 7 aa, synthetic construct
GDDKRPS

SEQ ID NO: 493 - protein, 7 aa, synthetic construct
ANNQRPS

SEQ ID NO: 494 - protein, 7 aa, synthetic construct
DDDKRPS

SEQ ID NO: 495 - protein, 7 aa, synthetic construct
YNNKRPS

SEQ ID NO: 496 - protein, 7 aa, synthetic construct
EDDKRPS

SEQ ID NO: 497 - protein, 7 aa, synthetic construct
ENNNRPS

SEQ ID NO: 498 - protein, 7 aa, synthetic construct
DNNLRPS

SEQ ID NO: 499 - protein, 7 aa, synthetic construct
ESNKRPS

SEQ ID NO: 500 - protein, 7 aa, synthetic construct
DTDKRPS

SEQ ID NO: 501 - protein, 7 aa, synthetic construct
DDDQRPS

SEQ ID NO: 502 - protein, 7 aa, synthetic construct
VNNKRPS

SEQ ID NO: 503 - protein, 7 aa, synthetic construct
DDYKRPS

SEQ ID NO: 504 - protein, 7 aa, synthetic construct
DNTKRPS

SEQ ID NO: 505 - protein, 7 aa, synthetic construct
DDTERPS

SEQ ID NO: 506 - protein, 7 aa, synthetic construct
GNDKRPS

SEQ ID NO: 507 - protein, 7 aa, synthetic construct
DNEKRPS

SEQ ID NO: 508 - protein, 7 aa, synthetic construct
DNDDRPS

SEQ ID NO: 509 - protein, 7 aa, synthetic construct
DDNRRPS

SEQ ID NO: 510 - protein, 7 aa, synthetic construct
GNNKRPS

SEQ ID NO: 511 - protein, 7 aa, synthetic construct
ANDKRPS

SEQ ID NO: 512 - protein, 7 aa, synthetic construct
DNNKRHS

SEQ ID NO: 513 - protein, 7 aa, synthetic construct
DDNQRPS

SEQ ID NO: 514 - protein, 7 aa, synthetic construct
GNDRRPS

SEQ ID NO: 515 - protein, 7 aa, synthetic construct
DNHNRPS

SEQ ID NO: 516 - protein, 7 aa, synthetic construct
DNYERPS

SEQ ID NO: 517 - protein, 7 aa, synthetic construct
ENNKRSS

SEQ ID NO: 518 - protein, 7 aa, synthetic construct
DDHKRPS

SEQ ID NO: 519 - protein, 7 aa, synthetic construct
DNNKRRS

SEQ ID NO: 520 - protein, 7 aa, synthetic construct
DNDKRPS

SEQ ID NO: 521 - protein, 7 aa, synthetic construct
DKNKRPS

SEQ ID NO: 522 - protein, 7 aa, synthetic construct
DNNKRPS

SEQ ID NO: 523 - protein, 7 aa, synthetic construct
DIDKRPS

SEQ ID NO: 524 - protein, 7 aa, synthetic construct
DDKKRPS

SEQ ID NO: 525 - protein, 7 aa, synthetic construct
ANNKRPS

SEQ ID NO: 526 - protein, 7 aa, synthetic construct
DNDKGPS

SEQ ID NO: 527 - protein, 7 aa, synthetic construct
EDNRRPS

SEQ ID NO: 528 - protein, 7 aa, synthetic construct
ENNKRPS

SEQ ID NO: 529 - protein, 7 aa, synthetic construct
NNNKRPS

SEQ ID NO: 530 - protein, 7 aa, synthetic construct
DNNERPS

SEQ ID NO: 531 - protein, 7 aa, synthetic construct
DNIQRPS

SEQ ID NO: 532 - protein, 7 aa, synthetic construct
DNNYRPS

SEQ ID NO: 533 - protein, 7 aa, synthetic construct
DNYNRPS

SEQ ID NO: 534 - DNA, 21 bp, synthetic construct
  source 1..21: mol_type = other DNA
gacaataataagcgaccccca

SEQ ID NO: 535 - DNA, 21 bp, synthetic construct
  source 1..21: mol_type = other DNA
gagaataataggcgaccctca

SEQ ID NO: 536 - DNA, 21 bp, synthetic construct
  source 1..21: mol_type = other DNA
gacaataataagcaaccctca

SEQ ID NO: 537 - DNA, 21 bp, synthetic construct
  source 1..21: mol_type = other DNA
gacaataacaagcgacccttg

SEQ ID NO: 538 - DNA, 21 bp, synthetic construct
  source 1..21: mol_type = other DNA
gacaatgataagcgacccgca

SEQ ID NO: 539 - DNA, 21 bp, synthetic construct
  source 1..21: mol_type = other DNA
gacaatcatgagcgaccctca

SEQ ID NO: 540 - DNA, 21 bp, synthetic construct
  source 1..21: mol_type = other DNA
gaaaaccgtaagcgaccctca

SEQ ID NO: 541 - DNA, 21 bp, synthetic construct
  source 1..21: mol_type = other DNA
gacaatgatcagcgaccctca

SEQ ID NO: 542 - DNA, 21 bp, synthetic construct
  source 1..21: mol_type = other DNA
gagaattataagcgaccctca

SEQ ID NO: 543 - DNA, 21 bp, synthetic construct
  source 1..21: mol_type = other DNA
gaaaatactaagcgaccctca

SEQ ID NO: 544 - DNA, 21 bp, synthetic construct
  source 1..21: mol_type = other DNA
gacactgagaagaggccctca

SEQ ID NO: 545 - DNA, 21 bp, synthetic construct
  source 1..21: mol_type = other DNA
gacaatgataagcgaccccca

SEQ ID NO: 546 - DNA, 21 bp, synthetic construct
  source 1..21: mol_type = other DNA
gaccataataagcgaccctca

SEQ ID NO: 547 - DNA, 21 bp, synthetic construct
  source 1..21: mol_type = other DNA
ggcaataatgagcgaccctca

SEQ ID NO: 548 - DNA, 21 bp, synthetic construct
  source 1..21: mol_type = other DNA
gacactagtaagcgaccctca

SEQ ID NO: 549 - DNA, 21 bp, synthetic construct
  source 1..21: mol_type = other DNA
gaatataataagcgcccctca

SEQ ID NO: 550 - DNA, 21 bp, synthetic construct
  source 1..21: mol_type = other DNA
gaaaatattaagcgaccctca

SEQ ID NO: 551 - DNA, 21 bp, synthetic construct
  source 1..21: mol_type = other DNA
gacaatgttaagcgaccctca

SEQ ID NO: 552 - DNA, 21 bp, synthetic construct
  source 1..21: mol_type = other DNA
gaaaacgataaacgatcctca

SEQ ID NO: 553 - DNA, 21 bp, synthetic construct
  source 1..21: mol_type = other DNA
gaaaataataagcgacactca

SEQ ID NO: 554 - DNA, 21 bp, synthetic construct
  source 1..21: mol_type = other DNA
ggaaatgatcagcgaccctca

SEQ ID NO: 555 - DNA, 21 bp, synthetic construct
  source 1..21: mol_type = other DNA
gacaatgataggcgaccctca

SEQ ID NO: 556 - DNA, 21 bp, synthetic construct
  source 1..21: mol_type = other DNA
gacaatcataagcggccctca

SEQ ID NO: 557 - DNA, 21 bp, synthetic construct
  source 1..21: mol_type = other DNA
gacaataatgaccgaccctca

SEQ ID NO: 558 - DNA, 21 bp, synthetic construct
  source 1..21: mol_type = other DNA
gagaataatcagcgaccctca

SEQ ID NO: 559 - DNA, 21 bp, synthetic construct
  source 1..21: mol_type = other DNA
gacaataatcagcgaccctca

SEQ ID NO: 560 - DNA, 21 bp, synthetic construct
  source 1..21: mol_type = other DNA
gagaatgttaagcgaccctca

SEQ ID NO: 561 - DNA, 21 bp, synthetic construct
  source 1..21: mol_type = other DNA
gacacttataagagaccctca

SEQ ID NO: 562 - DNA, 21 bp, synthetic construct
  source 1..21: mol_type = other DNA
aacaataataaccgaccctca

SEQ ID NO: 563 - DNA, 21 bp, synthetic construct
  source 1..21: mol_type = other DNA
ggcaataataatcgaccctca

SEQ ID NO: 564 - DNA, 21 bp, synthetic construct
  source 1..21: mol_type = other DNA
gaaaatgatcagcgaccctca

SEQ ID NO: 565 - DNA, 21 bp, synthetic construct
  source 1..21: mol_type = other DNA
gacaataataagcgagcctca

SEQ ID NO: 566 - DNA, 21 bp, synthetic construct
  source 1..21: mol_type = other DNA
gacaatgataagcgaccctta

SEQ ID NO: 567 - DNA, 21 bp, synthetic construct
  source 1..21: mol_type = other DNA
gacactgatgagcgaccttca

SEQ ID NO: 568 - DNA, 21 bp, synthetic construct
  source 1..21: mol_type = other DNA
gacaataggaagcgaccctca

SEQ ID NO: 569 - DNA, 21 bp, synthetic construct
  source 1..21: mol_type = other DNA
gacaatgatgctcgaccctca

SEQ ID NO: 570 - DNA, 21 bp, synthetic construct
  source 1..21: mol_type = other DNA
gacaataataagcgactctca

SEQ ID NO: 571 - DNA, 21 bp, synthetic construct
  source 1..21: mol_type = other DNA
gacaatgataagcgagcctca

SEQ ID NO: 572 - DNA, 21 bp, synthetic construct
  source 1..21: mol_type = other DNA
gacaatactgagcgaccctca

SEQ ID NO: 573 - DNA, 21 bp, synthetic construct
  source 1..21: mol_type = other DNA
gacaataatattcgaccctca

SEQ ID NO: 574 - DNA, 21 bp, synthetic construct
  source 1..21: mol_type = other DNA
gacaataagaggcgaccctca

SEQ ID NO: 575 - DNA, 21 bp, synthetic construct
  source 1..21: mol_type = other DNA
gacgataataaccgaccctca

SEQ ID NO: 576 - DNA, 21 bp, synthetic construct
  source 1..21: mol_type = other DNA
gcgaataatcgacgaccctca

SEQ ID NO: 577 - DNA, 21 bp, synthetic construct
  source 1..21: mol_type = other DNA
gacaatgataagcgactgtca

SEQ ID NO: 578 - DNA, 21 bp, synthetic construct
  source 1..21: mol_type = other DNA
gacaataataagcgacccgca

SEQ ID NO: 579 - DNA, 21 bp, synthetic construct
  source 1..21: mol_type = other DNA
gacaattatagacgtccctca

SEQ ID NO: 580 - DNA, 21 bp, synthetic construct
  source 1..21: mol_type = other DNA
gccaatgatcagcgaccctca

SEQ ID NO: 581 - DNA, 21 bp, synthetic construct
  source 1..21: mol_type = other DNA
gacaatgataagcgacgctca

SEQ ID NO: 582 - DNA, 21 bp, synthetic construct
  source 1..21: mol_type = other DNA
gacaagaatgagcgaccctca

SEQ ID NO: 583 - DNA, 21 bp, synthetic construct
  source 1..21: mol_type = other DNA
gacaataaggagcgaccctca

SEQ ID NO: 584 - DNA, 21 bp, synthetic construct
  source 1..21: mol_type = other DNA
gacaataataagggaccctca

SEQ ID NO: 585 - DNA, 21 bp, synthetic construct
  source 1..21: mol_type = other DNA
gaaaatgatagacgaccctca

SEQ ID NO: 586 - DNA, 21 bp, synthetic construct
  source 1..21: mol_type = other DNA
gaaaatgatgagcgaccctca

SEQ ID NO: 587 - DNA, 21 bp, synthetic construct
  source 1..21: mol_type = other DNA
caaaataataagcgaccctca

SEQ ID NO: 588 - DNA, 21 bp, synthetic construct
  source 1..21: mol_type = other DNA
gacaatcgtgagcgaccctca

SEQ ID NO: 589 - DNA, 21 bp, synthetic construct
  source 1..21: mol_type = other DNA
gacaataatagacgaccctca

SEQ ID NO: 590 - DNA, 21 bp, synthetic construct
  source 1..21: mol_type = other DNA
ggaaataataggcgaccctca

SEQ ID NO: 591 - DNA, 21 bp, synthetic construct
  source 1..21: mol_type = other DNA
gacaatgataaccgaccctca

SEQ ID NO: 592 - DNA, 21 bp, synthetic construct
  source 1..21: mol_type = other DNA
gaagataataagcgaccctca

SEQ ID NO: 593 - DNA, 21 bp, synthetic construct
  source 1..21: mol_type = other DNA
gacgatgatgagcggccctca

SEQ ID NO: 594 - DNA, 21 bp, synthetic construct
  source 1..21: mol_type = other DNA
gcaagtaataagcgaccctca

SEQ ID NO: 595 - DNA, 21 bp, synthetic construct
  source 1..21: mol_type = other DNA
gacaataataagcgatcctca

SEQ ID NO: 596 - DNA, 21 bp, synthetic construct
  source 1..21: mol_type = other DNA
caaaataatgagcgaccctca

SEQ ID NO: 597 - DNA, 21 bp, synthetic construct
  source 1..21: mol_type = other DNA
gacgatgataggcgaccctca

SEQ ID NO: 598 - DNA, 21 bp, synthetic construct
  source 1..21: mol_type = other DNA
aacaatgataagcgaccctca

SEQ ID NO: 599 - DNA, 21 bp, synthetic construct
  source 1..21: mol_type = other DNA
gacaataataaccgaccctca

SEQ ID NO: 600 - DNA, 21 bp, synthetic construct
  source 1..21: mol_type = other DNA
gacaataatgtgcgaccctca

SEQ ID NO: 601 - DNA, 21 bp, synthetic construct
  source 1..21: mol_type = other DNA
gaaaataatgagcgaccctca

SEQ ID NO: 602 - DNA, 21 bp, synthetic construct
  source 1..21: mol_type = other DNA
gacaataatcaccgaccctca

SEQ ID NO: 603 - DNA, 21 bp, synthetic construct
  source 1..21: mol_type = other DNA
gacaatgatgagcgcccctcg

SEQ ID NO: 604 - DNA, 21 bp, synthetic construct
  source 1..21: mol_type = other DNA
gacaatatccggcgaccctca

SEQ ID NO: 605 - DNA, 21 bp, synthetic construct
  source 1..21: mol_type = other DNA
gactttaataagcgaccctca

SEQ ID NO: 606 - DNA, 21 bp, synthetic construct
  source 1..21: mol_type = other DNA
gaaactaataagcgaccctca

SEQ ID NO: 607 - DNA, 21 bp, synthetic construct
  source 1..21: mol_type = other DNA
aacgataataagcgaccctca

SEQ ID NO: 608 - DNA, 21 bp, synthetic construct
  source 1..21: mol_type = other DNA
gacgataataagcgaccctca

SEQ ID NO: 609 - DNA, 21 bp, synthetic construct
  source 1..21: mol_type = other DNA
gacaattataagcgaccctca

SEQ ID NO: 610 - DNA, 21 bp, synthetic construct
  source 1..21: mol_type = other DNA
cacaataataagcgaccctca

SEQ ID NO: 611 - DNA, 21 bp, synthetic construct
  source 1..21: mol_type = other DNA
gacaatcatcagcgaccctca

SEQ ID NO: 612 - DNA, 21 bp, synthetic construct
  source 1..21: mol_type = other DNA
gacaattataagcgagcctca

SEQ ID NO: 613 - DNA, 21 bp, synthetic construct
  source 1..21: mol_type = other DNA
gacaatattaagcgaccctca

SEQ ID NO: 614 - DNA, 21 bp, synthetic construct
  source 1..21: mol_type = other DNA
gacactcataagcgaccctca

SEQ ID NO: 615 - DNA, 21 bp, synthetic construct
  source 1..21: mol_type = other DNA
gacactaataggcgaccctct

SEQ ID NO: 616 - DNA, 21 bp, synthetic construct
  source 1..21: mol_type = other DNA
gacactaatcagcgaccctca

SEQ ID NO: 617 - DNA, 21 bp, synthetic construct
  source 1..21: mol_type = other DNA
gaaagtgataagcgaccctca

SEQ ID NO: 618 - DNA, 21 bp, synthetic construct
  source 1..21: mol_type = other DNA
gacaatgataagcgatcttcg

SEQ ID NO: 619 - DNA, 21 bp, synthetic construct
  source 1..21: mol_type = other DNA
ggcagtaataagcgaccctca

SEQ ID NO: 620 - DNA, 21 bp, synthetic construct
  source 1..21: mol_type = other DNA
gacaataacaagcgagtttca

SEQ ID NO: 621 - DNA, 21 bp, synthetic construct
  source 1..21: mol_type = other DNA
aacaataataggcgaccctca

SEQ ID NO: 622 - DNA, 21 bp, synthetic construct
  source 1..21: mol_type = other DNA
gacaattttaagcgaccctca

SEQ ID NO: 623 - DNA, 21 bp, synthetic construct
  source 1..21: mol_type = other DNA
gaaaatgataaacgaccctca

SEQ ID NO: 624 - DNA, 21 bp, synthetic construct
  source 1..21: mol_type = other DNA
gaaaataataagcgactctca

SEQ ID NO: 625 - DNA, 21 bp, synthetic construct
  source 1..21: mol_type = other DNA
gcagataataagcgaccctca

SEQ ID NO: 626 - DNA, 21 bp, synthetic construct
  source 1..21: mol_type = other DNA
gaagataatgagcgcccctca

SEQ ID NO: 627 - DNA, 21 bp, synthetic construct
  source 1..21: mol_type = other DNA
gacactgatcagcgaccctca

SEQ ID NO: 628 - DNA, 21 bp, synthetic construct
  source 1..21: mol_type = other DNA
gacaattatcagcgaccctca

SEQ ID NO: 629 - DNA, 21 bp, synthetic construct
  source 1..21: mol_type = other DNA
gacgagaataagcgaccctca

SEQ ID NO: 630 - DNA, 21 bp, synthetic construct
  source 1..21: mol_type = other DNA
gacactaataagcgaccctca

SEQ ID NO: 631 - DNA, 21 bp, synthetic construct
  source 1..21: mol_type = other DNA
gacgattatcggcgaccctca

SEQ ID NO: 632 - DNA, 21 bp, synthetic construct
  source 1..21: mol_type = other DNA
gacaacgataagcggcactca

SEQ ID NO: 633 - DNA, 21 bp, synthetic construct
  source 1..21: mol_type = other DNA
gaaaatgataatcgaccctca

SEQ ID NO: 634 - DNA, 21 bp, synthetic construct
  source 1..21: mol_type = other DNA
gacgataatgagcgcccctca

SEQ ID NO: 635 - DNA, 21 bp, synthetic construct
  source 1..21: mol_type = other DNA
gacaataagaagcgaccctca

SEQ ID NO: 636 - DNA, 21 bp, synthetic construct
  source 1..21: mol_type = other DNA
gacgttgataagcgaccctca

SEQ ID NO: 637 - DNA, 21 bp, synthetic construct
  source 1..21: mol_type = other DNA
gaaaataaaaaacgaccctct

SEQ ID NO: 638 - DNA, 21 bp, synthetic construct
  source 1..21: mol_type = other DNA
gtcaatgataagcgaccctca

SEQ ID NO: 639 - DNA, 21 bp, synthetic construct
  source 1..21: mol_type = other DNA
gacaatgatcaccgaccctca

SEQ ID NO: 640 - DNA, 21 bp, synthetic construct
  source 1..21: mol_type = other DNA
gacattaataagcgaccctca

SEQ ID NO: 641 - DNA, 21 bp, synthetic construct
  source 1..21: mol_type = other DNA
gccaataatgagcgaccctca

SEQ ID NO: 642 - DNA, 21 bp, synthetic construct
  source 1..21: mol_type = other DNA
gacaatgaaaaccgaccgtca

SEQ ID NO: 643 - DNA, 21 bp, synthetic construct
  source 1..21: mol_type = other DNA
ggcgatgataagcgaccctca

SEQ ID NO: 644 - DNA, 21 bp, synthetic construct
  source 1..21: mol_type = other DNA
gccaataatcagcgaccttca

SEQ ID NO: 645 - DNA, 21 bp, synthetic construct
  source 1..21: mol_type = other DNA
gacgatgataagcgaccctca

SEQ ID NO: 646 - DNA, 21 bp, synthetic construct
  source 1..21: mol_type = other DNA
tacaataataagcggccctca

SEQ ID NO: 647 - DNA, 21 bp, synthetic construct
  source 1..21: mol_type = other DNA
gaagatgataagcgaccctca

SEQ ID NO: 648 - DNA, 21 bp, synthetic construct
  source 1..21: mol_type = other DNA
gaaaacaataaccgaccctcg

SEQ ID NO: 649 - DNA, 21 bp, synthetic construct
  source 1..21: mol_type = other DNA
gacaataatctgcgaccctca

SEQ ID NO: 650 - DNA, 21 bp, synthetic construct
  source 1..21: mol_type = other DNA
gagagtaacaagcgaccctca

SEQ ID NO: 651 - DNA, 21 bp, synthetic construct
  source 1..21: mol_type = other DNA
gacactgataagcggccctca

SEQ ID NO: 652 - DNA, 21 bp, synthetic construct
  source 1..21: mol_type = other DNA
gacgatgatcagcgaccctca

SEQ ID NO: 653 - DNA, 21 bp, synthetic construct
  source 1..21: mol_type = other DNA
gtgaataataagagaccctcc

SEQ ID NO: 654 - DNA, 21 bp, synthetic construct
  source 1..21: mol_type = other DNA
gacgattataagcgaccctca

SEQ ID NO: 655 - DNA, 21 bp, synthetic construct
  source 1..21: mol_type = other DNA
gacaatactaagcgaccctca

SEQ ID NO: 656 - DNA, 21 bp, synthetic construct
  source 1..21: mol_type = other DNA
gacgatactgagcgaccctca

SEQ ID NO: 657 - DNA, 21 bp, synthetic construct
  source 1..21: mol_type = other DNA
ggcaatgataagcgaccctca

SEQ ID NO: 658 - DNA, 21 bp, synthetic construct
  source 1..21: mol_type = other DNA
gacaatgaaaagcgaccctca

SEQ ID NO: 659 - DNA, 21 bp, synthetic construct
  source 1..21: mol_type = other DNA
gacaatgatgaccgaccctca

SEQ ID NO: 660 - DNA, 21 bp, synthetic construct
  source 1..21: mol_type = other DNA
gacgataataggcgtccctca

SEQ ID NO: 661 - DNA, 21 bp, synthetic construct
  source 1..21: mol_type = other DNA
ggcaataataagcgaccctca

SEQ ID NO: 662 - DNA, 21 bp, synthetic construct
  source 1..21: mol_type = other DNA
gccaatgataagcgaccctca

SEQ ID NO: 663 - DNA, 21 bp, synthetic construct
  source 1..21: mol_type = other DNA
gacaataataagcgacactca

SEQ ID NO: 664 - DNA, 21 bp, synthetic construct
  source 1..21: mol_type = other DNA
gacgacaatcagcgaccctca

SEQ ID NO: 665 - DNA, 21 bp, synthetic construct
  source 1..21: mol_type = other DNA
ggcaatgataggcgaccctca

SEQ ID NO: 666 - DNA, 21 bp, synthetic construct
  source 1..21: mol_type = other DNA
gacaatcataaccgaccctca

SEQ ID NO: 667 - DNA, 21 bp, synthetic construct
  source 1..21: mol_type = other DNA
gacaattatgagcgaccctca

SEQ ID NO: 668 - DNA, 21 bp, synthetic construct
  source 1..21: mol_type = other DNA
gaaaataataagcgatcctca

SEQ ID NO: 669 - DNA, 21 bp, synthetic construct
  source 1..21: mol_type = other DNA
gacgatcataagcggccctca

SEQ ID NO: 670 - DNA, 21 bp, synthetic construct
  source 1..21: mol_type = other DNA
gacaataataaacgacgttca

SEQ ID NO: 671 - DNA, 21 bp, synthetic construct
  source 1..21: mol_type = other DNA
gacaatgataagcgaccgtca

SEQ ID NO: 672 - DNA, 21 bp, synthetic construct
  source 1..21: mol_type = other DNA
gacaagaataagcgaccctca

SEQ ID NO: 673 - DNA, 21 bp, synthetic construct
  source 1..21: mol_type = other DNA
gacaataataagcgaccctca

SEQ ID NO: 674 - DNA, 21 bp, synthetic construct
  source 1..21: mol_type = other DNA
gacattgataagcgaccctca

SEQ ID NO: 675 - DNA, 21 bp, synthetic construct
  source 1..21: mol_type = other DNA
gacgataagaagcgaccctca

SEQ ID NO: 676 - DNA, 21 bp, synthetic construct
  source 1..21: mol_type = other DNA
gccaataataagcgaccctca

SEQ ID NO: 677 - DNA, 21 bp, synthetic construct
  source 1..21: mol_type = other DNA
gacaatgataagggaccctca

SEQ ID NO: 678 - DNA, 21 bp, synthetic construct
  source 1..21: mol_type = other DNA
gaagataataggcgaccctca

SEQ ID NO: 679 - DNA, 21 bp, synthetic construct
  source 1..21: mol_type = other DNA
gagaataataagcgaccctca

SEQ ID NO: 680 - DNA, 21 bp, synthetic construct
  source 1..21: mol_type = other DNA
aacaataataagcgaccctca

SEQ ID NO: 681 - DNA, 21 bp, synthetic construct
  source 1..21: mol_type = other DNA
gacaataatgagcgaccctca

SEQ ID NO: 682 - DNA, 21 bp, synthetic construct
  source 1..21: mol_type = other DNA
gacaatattcagcgaccctca

SEQ ID NO: 683 - DNA, 21 bp, synthetic construct
  source 1..21: mol_type = other DNA
gacaataattaccgaccctca

SEQ ID NO: 684 - DNA, 21 bp, synthetic construct
  source 1..21: mol_type = other DNA
gacaattataaccgaccctca

SEQ ID NO: 685 - protein, 13 aa, synthetic construct [sequence omitted]

SEQ ID NO: 686 - protein, 13 aa, synthetic construct [sequence omitted]

SEQ ID NO: 687 - protein, 13 aa, synthetic construct [sequence omitted]

SEQ ID NO: 688 - protein, 13 aa, synthetic construct [sequence omitted]

SEQ ID NO: 689 - protein, 13 aa, synthetic construct [sequence omitted]

SEQ ID NO: 690 - protein, 13 aa, synthetic construct [sequence omitted]

SEQ ID NO: 691 - protein, 13 aa, synthetic construct [sequence omitted]

SEQ ID NO: 692 - protein, 13 aa, synthetic construct
CGTWDRSLSVWVF

SEQ ID NO: 693 - protein, 13 aa, synthetic construct [sequence omitted]

SEQ ID NO: 694 - protein, 13 aa, synthetic construct [sequence omitted]

SEQ ID NO: 695 - protein, 13 aa, synthetic construct [sequence omitted]

SEQ ID NO: 696 - protein, 13 aa, synthetic construct [sequence omitted]

SEQ ID NO: 697 - protein, 13 aa, synthetic construct [sequence omitted]

SEQ ID NO: 698 - protein, 13 aa, synthetic construct
CGTWESSLSAWVF

SEQ ID NO: 699 - protein, 13 aa, synthetic construct
CGTWDTTLSAGVF

SEQ ID NO: 700 - protein, 13 aa, synthetic construct [sequence omitted]

SEQ ID NO: 701 - protein, 13 aa, synthetic construct [sequence omitted]

SEQ ID NO: 702 - protein, 13 aa, synthetic construct
CGTWDTSLSTGVF

SEQ ID NO: 703 - protein, 13 aa, synthetic construct [sequence omitted]

SEQ ID NO: 704 - protein, 13 aa, synthetic construct [sequence omitted]

SEQ ID NO: 705 - protein, 13 aa, synthetic construct
CGTWDTSLSAEVF

SEQ ID NO: 706 - protein, 13 aa, synthetic construct [sequence omitted]

SEQ ID NO: 707 - protein, 13 aa, synthetic construct [sequence omitted]

SEQ ID NO: 708 - protein, 13 aa, synthetic construct [sequence omitted]

SEQ ID NO: 709 - protein, 13 aa, synthetic construct
CGTWDNTLSAWVF

SEQ ID NO: 710 - protein, 13 aa, synthetic construct [sequence omitted]

SEQ ID NO: 711 - protein, 13 aa, synthetic construct [sequence omitted]

SEQ ID NO: 712 - protein, 13 aa, synthetic construct
CGTWHSSLSAGVF

SEQ ID NO: 713 - protein, 13 aa, synthetic construct
CGTWGSSLSAWVF

SEQ ID NO: 714 - protein, 13 aa, synthetic construct
CGTWESSLSGWVF

SEQ ID NO: 715 - protein, 13 aa, synthetic construct [sequence omitted]

SEQ ID NO: 716 - protein, 13 aa, synthetic construct [sequence omitted]

SEQ ID NO: 717 - protein, 13 aa, synthetic construct [sequence omitted]

SEQ ID NO: 718 - protein, 13 aa, synthetic construct
CGTWDVSLSVGVF

SEQ ID NO: 719 - protein, 13 aa, synthetic construct [sequence omitted]

SEQ ID NO: 720 - protein, 13 aa, synthetic construct
CGTWDTTLNIGVF

SEQ ID NO: 721 - protein, 13 aa, synthetic construct [sequence omitted]

SEQ ID NO: 722 - protein, 13 aa, synthetic construct
CGTWDTSLTAAVF

SEQ ID NO: 723 - protein, 13 aa, synthetic construct
CGTWDTSLSVGLF

SEQ ID NO: 724 - protein, 13 aa, synthetic construct
CGTWDTSLSGRVF

SEQ ID NO: 725 - protein, 13 aa, synthetic construct [sequence omitted]

SEQ ID NO: 726 - protein, 13 aa, synthetic construct [sequence omitted]

SEQ ID NO: 727 - protein, 14 aa, synthetic construct
CGTWDTSLSAGGVF

SEQ ID NO: 728 - protein, 13 aa, synthetic construct
CGTWDTSLRAYVF

SEQ ID NO: 729 - protein, 13 aa, synthetic construct
CGTWDTSLRAWVF

SEQ ID NO: 730 - protein, 13 aa, synthetic construct [sequence omitted]

SEQ ID NO: 731 - protein, 13 aa, synthetic construct
CGTWDTSLNIWVF

SEQ ID NO: 732 - protein, 13 aa, synthetic construct
CGTWDTSLNIGVF

SEQ ID NO: 733 - protein, 13 aa, synthetic construct
CGTWDTSLIAVVF

SEQ ID NO: 734 - protein, 13 aa, synthetic construct
CGTWDRSLSGWVF

SEQ ID NO: 735 - protein, 13 aa, synthetic construct
CGTWDNRLSGWVF

SEQ ID NO: 736 - protein, 13 aa, synthetic construct [sequence omitted]

SEQ ID NO: 737 - protein, 13 aa, synthetic construct
CGTWDKGLSAWVF

SEQ ID NO: 738 - protein, 13 aa, synthetic construct [sequence omitted]

SEQ ID NO: 739 - protein, 15 aa, synthetic construct
CGTWDESLSGGEVVF

SEQ ID NO: 740 - protein, 13 aa, synthetic construct [sequence omitted]

SEQ ID NO: 741 - protein, 13 aa, synthetic construct
CGTWDAGLSAWVF

SEQ ID NO: 742 - protein, 13 aa, synthetic construct
CGAWDTSLSAWVF

SEQ ID NO: 743 - protein, 13 aa, synthetic construct [sequence omitted]

SEQ ID NO: 744 - protein, 13 aa, synthetic construct
CGAWDTSLRAGVF

SEQ ID NO: 745 - protein, 13 aa, synthetic construct
CATWDTSVSAWVF

SEQ ID NO: 746 - protein, 13 aa, synthetic construct [sequence omitted]

SEQ ID NO: 747 - protein, 13 aa, synthetic construct
CATWDNTLSAGVF

SEQ ID NO: 748 - protein, 13 aa, synthetic construct
CAAWDRSLSVWVF

SEQ ID NO: 749 - protein, 13 aa, synthetic construct
CYTWHSSLRGGVF

SEQ ID NO: 750 - protein, 13 aa, synthetic construct
CVTWTSSPSAWVF

SEQ ID NO: 751 - protein, 11 aa, synthetic construct
CVTWRGGLVLF

SEQ ID NO: 752 - protein, 13 aa, synthetic construct
CVTWDTSLTSVVL

SEQ ID NO: 753 - protein, 14 aa, synthetic construct
CVTWDTSLSVYWVF

SEQ ID NO: 754 - protein, 13 aa, synthetic construct
CVTWDTSLSAWVF

SEQ ID NO: 755 - protein, 13 aa, synthetic construct
CVTWDTDLSVALF

SEQ ID NO: 756 - protein, 13 aa, synthetic construct
CVTWDRSLSGWVF

SEQ ID NO: 757 - protein, 13 aa, synthetic construct
CVTWDRSLREVLF

SEQ ID NO: 758 - protein, 13 aa, synthetic construct
CVTWDRSLRAVVF

SEQ ID NO: 759 - protein, 13 aa, synthetic construct
CVTWDRSLDAGVF

SEQ ID NO: 760 - protein, 13 aa, synthetic construct
CVTWDNTLSAGVF

SEQ ID NO: 761 - protein, 13 aa, synthetic construct
CVTWDNNLFGVVF

SEQ ID NO: 762 - protein, 13 aa, synthetic construct
CVSWDTSLSGAVF

SEQ ID NO: 763 - protein, 13 aa, synthetic construct
CVSWDTSLSAGVF

SEQ ID NO: 764 - protein, 13 aa, synthetic construct
CTTWFRTPSDVVF

SEQ ID NO: 765 - protein, 13 aa, synthetic construct
CTTWFRTASDVVF

SEQ ID NO: 766 - protein, 12 aa, synthetic construct
CTTWDYGLSVVF

SEQ ID NO: 767 - protein, 14 aa, synthetic construct
CTARDTSLSPGGVF

SEQ ID NO: 768 - protein, 13 aa, synthetic construct
CSTWNTRPSDVVF

SEQ ID NO: 769 - protein, 13 aa, synthetic construct
CSTWESSLTTVVF

SEQ ID NO: 770 - protein, 13 aa, synthetic construct
CSTWDTSLTNVLF

SEQ ID NO: 771 - protein, 13 aa, synthetic construct
CSTWDTSLSGVVF

SEQ ID NO: 772 - protein, 13 aa, synthetic construct
CSTWDHSLKAALF

SEQ ID NO: 773 - protein, 13 aa, synthetic construct
CSTWDARLSVRVF

SEQ ID NO: 774 - protein, 12 aa, synthetic construct [sequence omitted]

SEQ ID NO: 775 - protein, 13 aa, synthetic construct
CSSYATRGLRVLF

SEQ ID NO: 776 - protein, 13 aa, synthetic construct
CSSWDATLSVRIF

SEQ ID NO: 777 - protein, 13 aa, synthetic construct
CQVWEGSSDHWVF

SEQ ID NO: 778 - protein, 13 aa, synthetic construct
CQTWDNRLSAVVF

SEQ ID NO: 779 - protein, 13 aa, synthetic construct
CQTWDHSLHVGVF

SEQ ID NO: 780 - protein, 13 aa, synthetic construct
CQSYDDILNVWVL

SEQ ID NO: 781 - protein, 13 aa, synthetic construct
CNTWDKSLTSELF

SEQ ID NO: 782 - protein, 13 aa, synthetic construct
CLTWDRSLNVRVF

SEQ ID NO: 783 - protein, 13 aa, synthetic construct
CLTWDHSLTAYVF

SEQ ID NO: 784 - protein, 13 aa, synthetic construct
CLTRDTSLSAPVF

SEQ ID NO: 785 - protein, 14 aa, synthetic construct
CKTWESGLNFGHVF

SEQ ID NO: 786 - protein, 13 aa, synthetic construct
CKTWDTSLSAVVF

SEQ ID NO: 787 - protein, 13 aa, synthetic construct
CGVWDVSLGAGVF

SEQ ID NO: 788 - protein, 13 aa, synthetic construct
CGVWDTTPSAVLF

SEQ ID NO: 789 - protein, 13 aa, synthetic construct
CGVWDTTLSAVLF

SEQ ID NO: 790 - protein, 11 aa, synthetic construct
CGVWDTSLGVF

SEQ ID NO: 791 - protein, 13 aa, synthetic construct
CGVWDTNLGKWVF

SEQ ID NO: 792 - protein, 14 aa, synthetic construct
CGVWDTGLDAGWVF

SEQ ID NO: 793 - protein, 13 aa, synthetic construct
CGVWDNVLEAYVF

SEQ ID NO: 794 - protein, 14 aa, synthetic construct
CGVWDISLSANWVF

SEQ ID NO: 795 - protein, 13 aa, synthetic construct
CGVWDHSLGIWAF

SEQ ID NO: 796 - protein, 13 aa, synthetic construct
CGVWDDILTAEVF

SEQ ID NO: 797 - protein, 11 aa, synthetic construct
CGVRDTSLGVF

SEQ ID NO: 798 - protein, 13 aa, synthetic construct
CGTYDTSLPAWVF

SEQ ID NO: 799 - protein, 13 aa, synthetic construct
CGTYDNLVFGYVF

SEQ ID NO: 800 - protein, 12 aa, synthetic construct
CGTYDDRLREVF

SEQ ID NO: 801 - protein, 13 aa, synthetic construct
CGTWVTSLSAGVF

SEQ ID NO: 802 - protein, 13 aa, synthetic construct
CGTWVSSLTTVVF

SEQ ID NO: 803 - protein, 13 aa, synthetic construct
CGTWVSSLNVWVF

SEQ ID NO: 804 - protein, 11 aa, synthetic construct
CGTWVGRFWVF

SEQ ID NO: 805 - protein, 14 aa, synthetic construct
CGTWSGGPSGHWLF

SEQ ID NO: 806 - protein, 14 aa, synthetic construct
CGTWSGGLSGHWLF

SEQ ID NO: 807 - protein, 13 aa, synthetic construct
CGTWQTGREAVLF

SEQ ID NO: 808 - protein, 12 aa, synthetic construct
CGTWQSRLRWVF

SEQ ID NO: 809 - protein, 12 aa, synthetic construct
CGTWQSRLGWVF

SEQ ID NO: 810 - protein, 14 aa, synthetic construct
CGTWPRSLSAVWVF

SEQ ID NO: 811 - protein, 15 aa, synthetic construct
CGTWNNYLSAGDVVF

SEQ ID NO: 812 - protein, 14 aa, synthetic construct
CGTWLGSQSPYWVF

SEQ ID NO: 813 - protein, 13 aa, synthetic construct
CGTWHTGLSAYVF

SEQ ID NO: 814 - protein, 15 aa, synthetic construct
CGTWHSTLSAGHWVF

SEQ ID NO: 815 - protein, 13 aa, synthetic construct
CGTWHSSLSTWVF

SEQ ID NO: 816 - protein, 13 aa, synthetic construct [sequence omitted]

SEQ ID NO: 817 - protein, 13 aa, synthetic construct
CGTWHSSLSAVVF

SEQ ID NO: 818 - protein, 13 aa, synthetic construct
CGTWHSGLSGWVF

SEQ ID NO: 819 - protein, 13 aa, synthetic construct
CGTWHNTLRNVIF

SEQ ID NO: 820 - protein, 12 aa, synthetic construct
CGTWHASLTAVF

SEQ ID NO: 821 - protein, 15 aa, synthetic construct
CGTWGWYGSQRGVVF

SEQ ID NO: 822 - protein, 15 aa, synthetic construct
CGTWGWYGGQRGVVF

SEQ ID NO: 823 - protein, 13 aa, synthetic construct
CGTWGTSLSAWVF

SEQ ID NO: 824 - protein, 13 aa, synthetic construct
CGTWGSSLTTGLF

SEQ ID NO: 825 - protein, 13 aa, synthetic construct
CGTWGSSLTAYVF

SEQ ID NO: 826 - protein, 12 aa, synthetic construct
CGTWGSSLSVVF

SEQ ID NO: 827 - protein, 13 aa, synthetic construct
CGTWGSSLSGGVF

SEQ ID NO: 828 - protein, 14 aa, synthetic construct
CGTWGSSLSAYWVF

SEQ ID NO: 829 - protein, 14 aa, synthetic construct
CGTWGSSLSAYVVF

SEQ ID NO: 830 - protein, 13 aa, synthetic construct
CGTWGSSLSAYVF

SEQ ID NO: 831 - protein, 13 aa, synthetic construct [sequence omitted]

SEQ ID NO: 832 - protein, 14 aa, synthetic construct
CGTWGSSLSAPYVF

SEQ ID NO: 833 - protein, 13 aa, synthetic construct
CGTWGSSLSAPVF

SEQ ID NO: 834 - protein, 13 aa, synthetic construct
CGTWGSSLSAGVF

SEQ ID NO: 835 - protein, 13 aa, synthetic construct
CGTWGSSLSAGLF

SEQ ID NO: 836 - protein, 14 aa, synthetic construct
CGTWGSSLSAGALF

SEQ ID NO: 837 - protein, 13 aa, synthetic construct
CGTWGSSLRAWVF

SEQ ID NO: 838 - protein, 13 aa, synthetic construct
CGTWFTSLASGVF

SEQ ID NO: 839 - protein, 13 aa, synthetic construct
CGTWETSLSVVVI

SEQ ID NO: 840 - protein, 12 aa, synthetic construct
CGTWETSLSGVF

SEQ ID NO: 841 - protein, 13 aa, synthetic construct
CGTWETSLSDWVF

SEQ ID NO: 842 - protein, 13 aa, synthetic construct [sequence omitted]

SEQ ID NO: 843 - protein, 13 aa, synthetic construct
CGTWETSLNYVAF

SEQ ID NO: 844 - protein, 13 aa, synthetic construct
CGTWETSLNTWLL

SEQ ID NO: 845 - protein, 14 aa, synthetic construct
CGTWETSESGNYIF

SEQ ID NO: 846 - protein, 13 aa, synthetic construct
CGTWETRLGTWVI

SEQ ID NO: 847 - protein, 12 aa, synthetic construct
CGTWETQLYWVF

SEQ ID NO: 848 - protein, 14 aa, synthetic construct
CGTWETGLSAGEVF

SEQ ID NO: 849 - protein, 13 aa, synthetic construct
CGTWESTLSVFLF

SEQ ID NO: 850 - protein, 13 aa, synthetic construct [sequence omitted]

SEQ ID NO: 851 - protein, 13 aa, synthetic construct
CGTWESSLTGVVF

SEQ ID NO: 852 - protein, 13 aa, synthetic construct
CGTWESSLTGFVF

SEQ ID NO: 853 - protein, 13 aa, synthetic construct
CGTWESSLSVGVF

SEQ ID NO: 854 - protein, 13 aa, synthetic construct
CGTWESSLSEWVF

SEQ ID NO: 855 - protein, 12 aa, synthetic construct
CGTWESSLSAVF

SEQ ID NO: 856 - protein, 14 aa, synthetic construct
CGTWESSLSAGYIF

SEQ ID NO: 857 - protein, 13 aa, synthetic construct [sequence omitted]

SEQ ID NO: 858 - protein, 14 aa, synthetic construct
CGTWESSLSAGPVF

SEQ ID NO: 859 - protein, 15 aa, synthetic construct
CGTWESSLSAGGQVF

SEQ ID NO: 860 - protein, 16 aa, synthetic construct
CGTWESSLSAFGGYVF

SEQ ID NO: 861 - protein, 13 aa, synthetic construct
CGTWESSLRVWVF

SEQ ID NO: 862 - protein, 15 aa, synthetic construct
CGTWESSLFTGPWVF

SEQ ID NO: 863 - protein, 13 aa, synthetic construct
CGTWESLSATYVF

SEQ ID NO: 864 - protein, 13 aa, synthetic construct
CGTWESGLSAGVF

SEQ ID NO: 865 - protein, 11 aa, synthetic construct
CGTWESDFWVF

SEQ ID NO: 866 - protein, 13 aa, synthetic construct
CGTWENRLSAVVF

SEQ ID NO: 867 - protein, 13 aa, synthetic construct
CGTWENRLSAGVF

SEQ ID NO: 868 - protein, 14 aa, synthetic construct
CGTWEISLTTSVVF

SEQ ID NO: 869 - protein, 14 aa, synthetic construct
CGTWEISLSTSVVF

SEQ ID NO: 870 - protein, 12 aa, synthetic construct
CGTWEGSLSVVF

SEQ ID NO: 871 - protein, 11 aa, synthetic construct
CGTWEGSLRVF

SEQ ID NO: 872 - protein, 12 aa, synthetic construct
CGTWEGSLRHVF

SEQ ID NO: 873 - protein, 14 aa, synthetic construct
CGTWDYSPVRAGVF

SEQ ID NO: 874 - protein, 13 aa, synthetic construct
CGTWDYSLSVYLF

SEQ ID NO: 875 - protein, 14 aa, synthetic construct
CGTWDYSLSSGVVF

SEQ ID NO: 876 - protein, 13 aa, synthetic construct [sequence omitted]

SEQ ID NO: 877 - protein, 13 aa, synthetic construct
CGTWDYSLSAEVF

SEQ ID NO: 878 - protein, 13 aa, synthetic construct
CGTWDYSLRRAIF

SEQ ID NO: 879 - protein, 13 aa, synthetic construct
CGTWDWSLILQLF

SEQ ID NO: 880 - protein, 13 aa, synthetic construct
CGTWDVTLHTGVF

SEQ ID NO: 881 - protein, 13 aa, synthetic construct
CGTWDVTLHIGVF

SEQ ID NO: 882 - protein, 13 aa, synthetic construct
CGTWDVTLHAGVF

SEQ ID NO: 883 - protein, 14 aa, synthetic construct
CGTWDVSLYSGGVF

SEQ ID NO: 884 - protein, 13 aa, synthetic construct
CGTWDVSLTSFVF

SEQ ID NO: 885 - protein, 13 aa, synthetic construct
CGTWDVSLSVGVL

SEQ ID NO: 886 - protein, 15 aa, synthetic construct
CGTWDVSLSAGDVVF

SEQ ID NO: 887 - protein, 13 aa, synthetic construct
CGTWDVSLNVVVF

SEQ ID NO: 888 - protein, 13 aa, synthetic construct
CGTWDVSLNTQVF

SEQ ID NO: 889 - protein, 12 aa, synthetic construct
CGTWDVSLGALF

SEQ ID NO: 890 - protein, 13 aa, synthetic construct
CGTWDVNLKTVVF

SEQ ID NO: 891 - protein, 13 aa, synthetic construct
CGTWDVILSAEVF

SEQ ID NO: 892 - protein, 13 aa, synthetic construct
CGTWDTTVSAVVF

SEQ ID NO: 893 - protein, 13 aa, synthetic construct
CGTWDTTLTAWVF

SEQ ID NO: 894 - protein, 13 aa, synthetic construct
CGTWDTTLSVFLF

SEQ ID NO: 895 - protein, 13 aa, synthetic construct
CGTWDTSVSAGVF

SEQ ID NO: 896 - protein, 13 aa, synthetic construct
CGTWDTSVISWVF

SEQ ID NO: 897 - protein, 15 aa, synthetic construct
CGTWDTSRSSLYVVF

SEQ ID NO: 898 - protein, 13 aa, synthetic construct
CGTWDTSRSAWVF

SEQ ID NO: 899 - protein, 14 aa, synthetic construct
CGTWDTSRNPGGIF

SEQ ID NO: 900 - protein, 12 aa, synthetic construct
CGTWDTSRGHVF

SEQ ID NO: 901 - protein, 15 aa, synthetic construct
CGTWDTSPSTGQVLF

SEQ ID NO: 902 - protein, 13 aa, synthetic construct
CGTWDTSPSAWVF

SEQ ID NO: 903 - protein, 12 aa, synthetic construct
CGTWDTSLTWVF

SEQ ID NO: 904 - protein, 14 aa, synthetic construct
CGTWDTSLTWFAVF

SEQ ID NO: 905 - protein, 13 aa, synthetic construct
CGTWDTSLTVVVF

SEQ ID NO: 906 - protein, 14 aa, synthetic construct
CGTWDTSLTTSWVF

SEQ ID NO: 907 - protein, 16 aa, synthetic construct
CGTWDTSLTTGPFWVF

SEQ ID NO: 908 - protein, 14 aa, synthetic construct
CGTWDTSLTPFYVF

SEQ ID NO: 909 - protein, 13 aa, synthetic construct [sequence omitted]

SEQ ID NO: 910 - protein, 13 aa, synthetic construct
CGTWDTSLTAWVF

SEQ ID NO: 911 - protein, 14 aa, synthetic construct
CGTWDTSLTAWGVF

SEQ ID NO: 912 - protein, 13 aa, synthetic construct
CGTWDTSLTAVVL

SEQ ID NO: 913 - protein, 13 aa, synthetic construct
CGTWDTSLTARVF

SEQ ID NO: 914 - protein, 13 aa, synthetic construct
CGTWDTSLTAIVF

SEQ ID NO: 915 - protein, 13 aa, synthetic construct [sequence omitted]

SEQ ID NO: 916 - protein, 13 aa, synthetic construct [sequence omitted]

SEQ ID NO: 917 - protein, 12 aa, synthetic construct [sequence omitted]

SEQ ID NO: 918 - protein, 13 aa, synthetic construct
CGTWDTSLSVGEF

SEQ ID NO: 919 - protein, 13 aa, synthetic construct
CGTWDTSLSTWVF

SEQ ID NO: 920 - protein, 13 aa, synthetic construct [sequence omitted]

SEQ ID NO: 921 - protein, 15 aa, synthetic construct
CGTWDTSLSTGQVLF

SEQ ID NO: 922 - protein, 16 aa, synthetic construct
CGTWDTSLSTGPLWVF

SEQ ID NO: 923 - protein, 13 aa, synthetic construct
CGTWDTSLSSYVF

SEQ ID NO: 924 - protein, 13 aa, synthetic construct [sequence omitted]

SEQ ID NO: 925 - protein, 14 aa, synthetic construct
CGTWDTSLSSRYIF

SEQ ID NO: 926 - protein, 14 aa, synthetic construct
CGTWDTSLSSRFIF

SEQ ID NO: 927 - protein, 14 aa, synthetic construct
CGTWDTSLSSGWVF

SEQ ID NO: 928 - protein, 13 aa, synthetic construct
CGTWDTSLSRYVF

SEQ ID NO: 929 - protein, 13 aa, synthetic construct
CGTWDTSLSQWLF

SEQ ID NO: 930 - protein, 15 aa, synthetic construct
CGTWDTSLSPGLWVF

SEQ ID NO: 931 - protein, 13 aa, synthetic construct
CGTWDTSLSNYVF

SEQ ID NO: 932 - protein, 13 aa, synthetic construct [sequence omitted]

SEQ ID NO: 933 - protein, 16 aa, synthetic construct
CGTWDTSLSIGPFWVF

SEQ ID NO: 934 - protein, 13 aa, synthetic construct [sequence omitted]

SEQ ID NO: 935 - protein, 13 aa, synthetic construct
CGTWDTSLSGTVF

SEQ ID NO: 936 - protein, 14 aa, synthetic construct
CGTWDTSLSGGQVF

SEQ ID NO: 937 - protein, 13 aa, synthetic construct
CGTWDTSLSGGIF

SEQ ID NO: 938 - protein, 15 aa, synthetic construct
CGTWDTSLSGEDVVI

SEQ ID NO: 939 - protein, 14 aa, synthetic construct
CGTWDTSLSFLYAF

SEQ ID NO: 940 - protein, 13 aa, synthetic construct
CGTWDTSLSEVVF

SEQ ID NO: 941 - protein, 12 aa, synthetic construct
CGTWDTSLSEVF

SEQ ID NO: 942 - protein, 14 aa, synthetic construct
CGTWDTSLSENWVF

SEQ ID NO: 943 - protein, 13 aa, synthetic construct
CGTWDTSLSAYIF

SEQ ID NO: 944 - protein, 13 aa, synthetic construct
CGTWDTSLSAVVL

SEQ ID NO: 945 - protein, 12 aa, synthetic construct [sequence omitted]

SEQ ID NO: 946 - protein, 13 aa, synthetic construct [sequence omitted]

SEQ ID NO: 947 - protein, 14 aa, synthetic construct
CGTWDTSLSARQVF

SEQ ID NO: 948 - protein, 13 aa, synthetic construct
CGTWDTSLSALVF

SEQ ID NO: 949 - protein, 13 aa, synthetic construct
CGTWDTSLSAKVF

SEQ ID NO: 950 - protein, 13 aa, synthetic construct
CGTWDTSLSAKIF

SEQ ID NO: 951 - protein, 14 aa, synthetic construct
CGTWDTSLSAKAVF

SEQ ID NO: 952 - protein, 14 aa, synthetic construct
CGTWDTSLSAHAVF

SEQ ID NO: 953 - protein, 14 aa, synthetic construct
CGTWDTSLSAGYVF

SEQ ID NO: 954 - protein, 15 aa, synthetic construct
CGTWDTSLSAGRWVF

SEQ ID NO: 955 - protein, 13 aa, synthetic construct
CGTWDTSLSAGIF

SEQ ID NO: 956 - protein, 16 aa, synthetic construct
CGTWDTSLSAGGFRVF

SEQ ID NO: 957 - protein, 13 aa, synthetic construct
CGTWDTSLSAGAF

SEQ ID NO: 958 - protein, 14 aa, synthetic construct
CGTWDTSLSADWFF

SEQ ID NO: 959 - protein, 15 aa, synthetic construct
CGTWDTSLSADEYVF

SEQ ID NO: 960 - protein, 14 aa, synthetic construct
CGTWDTSLSAAWVF

SEQ ID NO: 961 - protein, 13 aa, synthetic construct
CGTWDTSLSAALF

SEQ ID NO: 962 - protein, 14 aa, synthetic construct
CGTWDTSLSAAGVF

SEQ ID NO: 963 - protein, 13 aa, synthetic construct
CGTWDTSLRVVVF

SEQ ID NO: 964 - protein, 13 aa, synthetic construct
CGTWDTSLRTWVF

SEQ ID NO: 965 - protein, 13 aa, synthetic construct
CGTWDTSLRGAVF

SEQ ID NO: 966 - protein, 13 aa, synthetic construct [sequence omitted]

SEQ ID NO: 967 - protein, 14 aa, synthetic construct
CGTWDTSLNVVYVF

SEQ ID NO: 968 - protein, 13 aa, synthetic construct
CGTWDTSLNTYLF

SEQ ID NO: 969 - protein, 14 aa, synthetic construct
CGTWDTSLNFAWLF

SEQ ID NO: 970 - protein, 13 aa, synthetic construct
CGTWDTSLLVWLF

SEQ ID NO: 971 - protein, 13 aa, synthetic construct
CGTWDTSLKTWVF

SEQ ID NO: 972 - protein, 13 aa, synthetic construct
CGTWDTSLIVWVF

SEQ ID NO: 973 - protein, 13 aa, synthetic construct
CGTWDTSLITGVF

SEQ ID NO: 974 - protein, 13 aa, synthetic construct
CGTWDTSLISVVF

SEQ ID NO: 975 - protein, 13 aa, synthetic construct [sequence omitted]

SEQ ID NO: 976 - protein, 13 aa, synthetic construct
CGTWDTSLHTELF

SEQ ID NO: 977 - protein, 13 aa, synthetic construct
CGTWDTSLGSYVF

SEQ ID NO: 978 - protein, 14 aa, synthetic construct
CGTWDTSLGSLWVF

SEQ ID NO: 979 - protein, 13 aa, synthetic construct
CGTWDTSLGSGVF

SEQ ID NO: 980 - protein, 14 aa, synthetic construct
CGTWDTSLGGRGVF

SEQ ID NO: 981 - protein, 13 aa, synthetic construct
CGTWDTSLGAWVF

SEQ ID NO: 982 - protein, 13 aa, synthetic construct
CGTWDTSLGAVVF

SEQ ID NO: 983 - protein, 13 aa, synthetic construct [sequence omitted]

SEQ ID NO: 984 - protein, 13 aa, synthetic construct
CGTWDTSLGAGLF

SEQ ID NO: 985 - protein, 13 aa, synthetic construct
CGTWDTSLDAVVF

SEQ ID NO: 986 - protein, 13 aa, synthetic construct
CGTWDTSLDAVLF

SEQ ID NO: 987 - protein, 12 aa, synthetic construct
CGTWDTSLAWVF

SEQ ID NO: 988 - protein, 13 aa, synthetic construct
CGTWDTSLATGLF

SEQ ID NO: 989 - protein, 13 aa, synthetic construct
CGTWDTSLAPVVF

SEQ ID NO: 990 - protein, 13 aa, synthetic construct
CGTWDTRLTIVIF

SEQ ID NO: 991 - protein, 13 aa, synthetic construct
CGTWDTRLSVWLF

SEQ ID NO: 992 - protein, 13 aa, synthetic construct
CGTWDTRLSVGVF

SEQ ID NO: 993 - protein, 13 aa, synthetic construct
CGTWDTRLSTVIF

SEQ ID NO: 994 - protein, 13 aa, synthetic construct
CGTWDTRLSSVVF

SEQ ID NO: 995 - protein, 13 aa, synthetic construct
CGTWDTRLSIVVF

SEQ ID NO: 996 - protein, 14 aa, synthetic construct
CGTWDTRLSAYVVF

SEQ ID NO: 997 - protein, 13 aa, synthetic construct [sequence omitted]

SEQ ID NO: 998 - protein, 13 aa, synthetic construct [sequence omitted]

SEQ ID NO: 999 - protein, 13 aa, synthetic construct
CGTWDTRLSAGLF

SEQ ID NO: 1000 - protein, 14 aa, synthetic construct
CGTWDTRLSAGGVF

SEQ ID NO: 1001 - protein, 13 aa, synthetic construct
CGTWDTRLNVWLF

SEQ ID NO: 1002 - protein, 13 aa, synthetic construct
CGTWDTNREVVLL

SEQ ID NO: 1003 - protein, 13 aa, synthetic construct
CGTWDTNLRAHVF

SEQ ID NO: 1004 - protein, 13 aa, synthetic construct
CGTWDTNLPAVVF

SEQ ID NO: 1005 - protein, 12 aa, synthetic construct
CGTWDTNLGGVF

SEQ ID NO: 1006 - protein, 13 aa, synthetic construct
CGTWDTIVSIGVF

SEQ ID NO: 1007 - protein, 13 aa, synthetic construct
CGTWDTILSAVVF

SEQ ID NO: 1008 - protein, 13 aa, synthetic construct
CGTWDTILSAEVF

SEQ ID NO: 1009 - protein, 12 aa, synthetic construct
CGTWDTHLGVVF

SEQ ID NO: 1010 - protein, 14 aa, synthetic construct
CGTWDTGPSPHWLF

SEQ ID NO: 1011 - protein, 14 aa, synthetic construct
CGTWDTGLTFGGVF

SEQ ID NO: 1012 - protein, 13 aa, synthetic construct
CGTWDTGLTAFVF

SEQ ID NO: 1013 - protein, 13 aa, synthetic construct
CGTWDTGLSVWVF

SEQ ID NO: 1014 - protein, 13 aa, synthetic construct
CGTWDTGLSTGIF

SEQ ID NO: 1015 - protein, 13 aa, synthetic construct
CGTWDTGLSSLLF

SEQ ID NO: 1016 - protein, 13 aa, synthetic construct
CGTWDTGLSIVVF

SEQ ID NO: 1017 - protein, 13 aa, synthetic construct
CGTWDTGLSFVVF

SEQ ID NO: 1018 - protein, 13 aa, synthetic construct
CGTWDTGLSAWVF

SEQ ID NO: 1019 - protein, 14 aa, synthetic construct
CGTWDTGLSAGVVF

SEQ ID NO: 1020 - protein, 13 aa, synthetic construct
CGTWDTGLRGWIF

SEQ ID NO: 1021 - protein, 13 aa, synthetic construct
CGTWDTELSAGVF

SEQ ID NO: 1022 - protein, 13 aa, synthetic construct
CGTWDTALTAGVF

SEQ ID NO: 1023 - protein, 13 aa, synthetic construct
CGTWDTALSLVVF

SEQ ID NO: 1024 - protein, 13 aa, synthetic construct
CGTWDTALSAWLF

SEQ ID NO: 1025 - protein, 13 aa, synthetic construct [sequence omitted]

SEQ ID NO: 1026 - protein, 13 aa, synthetic construct
CGTWDTALRGVLF

SEQ ID NO: 1027 - protein, 13 aa, synthetic construct
CGTWDTALKEWLF

SEQ ID NO: 1028 - protein, 15 aa, synthetic construct
CGTWDRTLTAGDVLF

SEQ ID NO: 1029 - protein, 12 aa, synthetic construct
CGTWDRSVTYVF

SEQ ID NO: 1030 - protein, 13 aa, synthetic construct
CGTWDRSRNEWVF

SEQ ID NO: 1031 - protein, 13 aa, synthetic construct [sequence omitted]

SEQ ID NO: 1032 - protein, 14 aa, synthetic construct
CGTWDRSLTPGWLF

SEQ ID NO: 1033 - protein, 13 aa, synthetic construct
CGTWDRSLTAWVF

SEQ ID NO: 1034 - protein, 13 aa, synthetic construct [sequence omitted]

SEQ ID NO: 1035 - protein, 12 aa, synthetic construct
CGTWDRSLSVVF

SEQ ID NO: 1036 - protein, 13 aa, synthetic construct
CGTWDRSLSVQLF

SEQ ID NO: 1037 - protein, 14 aa, synthetic construct
CGTWDRSLSVLWVF

SEQ ID NO: 1038 - protein, 13 aa, synthetic construct
CGTWDRSLSVGLF

SEQ ID NO: 1039 - protein, 13 aa, synthetic construct
CGTWDRSLSTWVF

SEQ ID NO: 1040 - protein, 14 aa, synthetic construct
CGTWDRSLSTHWVL

SEQ ID NO: 1041 - protein, 14 aa, synthetic construct
CGTWDRSLSTHWVF

SEQ ID NO: 1042 - protein, 13 aa, synthetic construct
CGTWDRSLSSAVF

SEQ ID NO: 1043 - protein, 14 aa, synthetic construct
CGTWDRSLSPSYVF

SEQ ID NO: 1044 - protein, 13 aa, synthetic construct
CGTWDRSLSGEVF

SEQ ID NO: 1045 - protein, 13 aa, synthetic construct
CGTWDRSLSGAVF

SEQ ID NO: 1046 - protein, 13 aa, synthetic construct
CGTWDRSLSAVAF

SEQ ID NO: 1047 - protein, 14 aa, synthetic construct
CGTWDRSLSAGGEF

SEQ ID NO: 1048 - protein, 14 aa, synthetic construct
CGTWDRSLSAFWVF

SEQ ID NO: 1049 - protein, 13 aa, synthetic construct
CGTWDRSLSAAVF

SEQ ID NO: 1050 - protein, 13 aa, synthetic construct
CGTWDRSLSAALF

SEQ ID NO: 1051 - protein, 11 aa, synthetic construct
CGTWDRSLRVF

SEQ ID NO: 1052 - protein, 12 aa, synthetic construct
CGTWDRSLNWVF

SEQ ID NO: 1053 - protein, 13 aa, synthetic construct
CGTWDRSLNVYVF

SEQ ID NO: 1054 - protein, 13 aa, synthetic construct
CGTWDRSLNVGVF

SEQ ID NO: 1055 - protein, 12 aa, synthetic construct
CGTWDRSLHVVF

SEQ ID NO: 1056 - protein, 13 aa, synthetic construct
CGTWDRSLGGWVF

SEQ ID NO: 1057 - protein, 14 aa, synthetic construct
CGTWDRSLGAFWVF

SEQ ID NO: 1058 - protein, 12 aa, synthetic construct
CGTWDRSLFWVF

SEQ ID NO: 1059 - protein, 13 aa, synthetic construct [sequence omitted]

SEQ ID NO: 1060 - protein, 13 aa, synthetic construct
CGTWDRRLSGVVF

SEQ ID NO: 1061 - protein, 13 aa, synthetic construct
CGTWDRRLSDVVF

SEQ ID NO: 1062 - protein, 13 aa, synthetic construct [sequence omitted]

SEQ ID NO: 1063 - protein, 13 aa, synthetic construct
CGTWDRRLNVAFF

SEQ ID NO: 1064 - protein, 12 aa, synthetic construct
CGTWDRRLLAVF

SEQ ID NO: 1065 - protein, 13 aa, synthetic construct
CGTWDRNLRAVVF

SEQ ID NO: 1066 - protein, 12 aa, synthetic construct
CGTWDRLSAGVF

SEQ ID NO: 1067 - protein, 13 aa, synthetic construct
CGTWDRGPNTGVF

SEQ ID NO: 1068 - protein, 14 aa, synthetic construct
CGTWDRGLNTVYVF

SEQ ID NO: 1069 - protein, 14 aa, synthetic construct
CGTWDNYVSAPWVF

SEQ ID NO: 1070 - protein, 15 aa, synthetic construct
CGTWDNYLSAGDVVF

SEQ ID NO: 1071 - protein, 13 aa, synthetic construct
CGTWDNYLRAGVF

SEQ ID NO: 1072 - protein, 13 aa, synthetic construct
CGTWDNYLGAVVF

SEQ ID NO: 1073 - protein, 13 aa, synthetic construct
CGTWDNYLGAGVF

SEQ ID NO: 1074 - protein, 14 aa, synthetic construct
CGTWDNTVSAPWVF

SEQ ID NO: 1075 - protein, 13 aa, synthetic construct
CGTWDNTLSLWVF

SEQ ID NO: 1076 - protein, 13 aa, synthetic construct [sequence omitted]

SEQ ID NO: 1077 - protein, 13 aa, synthetic construct
CGTWDNTLLTVLF

SEQ ID NO: 1078 - protein, 13 aa, synthetic construct
CGTWDNRLSSVIF

SEQ ID NO: 1079 - protein, 13 aa, synthetic construct [sequence omitted]

SEQ ID NO: 1080 - protein, 14 aa, synthetic construct
CGTWDNRLSAGGIF

SEQ ID NO: 1081 - protein, 13 aa, synthetic construct
CGTWDNRLSAEVF

SEQ ID NO: 1082 - protein, 13 aa, synthetic construct
CGTWDNRLRVGVL

SEQ ID NO: 1083 - protein, 13 aa, synthetic construct
CGTWDNRLLENVF

SEQ ID NO: 1084 - protein, 12 aa, synthetic construct
CGTWDNNLRAVF

SEQ ID NO: 1085 - protein, 13 aa, synthetic construct
CGTWDNNLRAGVF

SEQ ID NO: 1086 - protein, 14 aa, synthetic construct
CGTWDNNLGGGRVF

SEQ ID NO: 1087 - protein, 13 aa, synthetic construct
CGTWDNNLGAGVL

SEQ ID NO: 1088 - protein, 13 aa, synthetic construct
CGTWDNNLGAGVF

SEQ ID NO: 1089 - protein, 13 aa, synthetic construct
CGTWDNILSAAVF

SEQ ID NO: 1090 - protein, 13 aa, synthetic construct
CGTWDNILDAGVF

SEQ ID NO: 1091 - protein, 13 aa, synthetic construct
CGTWDNDLSGWLF

SEQ ID NO: 1092 - protein, 13 aa, synthetic construct
CGTWDNDLSAWVF

SEQ ID NO: 1093 - protein, 13 aa, synthetic construct
CGTWDLTLGGVVF

SEQ ID NO: 1094 - protein, 13 aa, synthetic construct
CGTWDLSLSAGVF

SEQ ID NO: 1095 - protein, 13 aa, synthetic construct
CGTWDLSLKEWVF

SEQ ID NO: 1096 - protein, 13 aa, synthetic construct
CGTWDLSLDAVVF

SEQ ID NO: 1097 - protein, 9 aa, synthetic construct
CGTWDLKVF

SEQ ID NO: 1098 - protein, 13 aa, synthetic construct
CGTWDKTLSVWVF

SEQ ID NO: 1099 - protein, 13 aa, synthetic construct
CGTWDKSLSVWVF

SEQ ID NO: 1100 - protein, 13 aa, synthetic construct
CGTWDKSLSGVVF

SEQ ID NO: 1101 - protein, 13 aa, synthetic construct
CGTWDKSLSDWVF

SEQ ID NO: 1102 - protein, 13 aa, synthetic construct
CGTWDKSLSALVF

SEQ ID NO: 1103 - protein, 13 aa, synthetic construct
CGTWDKSLSAGVF

SEQ ID NO: 1104 - protein, 13 aa, synthetic construct
CGTWDKSLSADVF

SEQ ID NO: 1105 - protein, 13 aa, synthetic construct
CGTWDKRLTIVVF

SEQ ID NO: 1106 - protein, 13 aa, synthetic construct
CGTWDKRLSAWVL

SEQ ID NO: 1107 - protein, 13 aa, synthetic construct
CGTWDKNLRAVVF

SEQ ID NO: 1108 - protein, 13 aa, synthetic construct
CGTWDITLSGFVF

SEQ ID NO: 1109 - protein, 13 aa, synthetic construct
CGTWDITLHTGVF

SEQ ID NO: 1110 - protein, 12 aa, synthetic construct
CGTWDISVTVVF

SEQ ID NO: 1111 - protein, 13 aa, synthetic construct
CGTWDISVRGYAF

SEQ ID NO: 1112 - protein, 11 aa, synthetic construct
CGTWDISRWVF

SEQ ID NO: 1113 - protein, 13 aa, synthetic construct
CGTWDISPSAWVF

SEQ ID NO: 1114 - protein, 13 aa, synthetic construct [sequence omitted]

SEQ ID NO: 1115 - protein, 12 aa, synthetic construct
CGTWDISLSVVF

SEQ ID NO: 1116 - protein, 13 aa, synthetic construct
CGTWDISLSSVVF

SEQ ID NO: 1117 - protein, 13 aa, synthetic construct
CGTWDISLSHWLF

SEQ ID NO: 1118 - protein, 13 aa, synthetic construct
CGTWDISLSGWVF

SEQ ID NO: 1119 - protein, 13 aa, synthetic construct
CGTWDISLSGRVF

SEQ ID NO: 1120 - protein, 13 aa, synthetic construct
CGTWDISLSAWAF

SEQ ID NO: 1121 - protein, 13 aa, synthetic construct [sequence omitted]

SEQ ID NO: 1122 - protein, 13 aa, synthetic construct
CGTWDISLSAVIF

SEQ ID NO: 1123 - protein, 12 aa, synthetic construct
CGTWDISLSAVF

SEQ ID NO: 1124 - protein, 13 aa, synthetic construct
CGTWDISLSARVF

SEQ ID NO: 1125 - protein, 13 aa, synthetic construct
CGTWDISLSALVF

SEQ ID NO: 1126 - protein, 13 aa, synthetic construct
CGTWDISLSAHVF

SEQ ID NO: 1127 - protein, 14 aa, synthetic construct
CGTWDISLSAGVVF

SEQ ID NO: 1128 - protein, 15 aa, synthetic construct
CGTWDISLSAGPYVF

SEQ ID NO: 1129 - protein, 14 aa, synthetic construct
CGTWDISLSAGGVF

SEQ ID NO: 1130 - protein, 13 aa, synthetic construct
CGTWDISLSAEVF

SEQ ID NO: 1131 - protein, 13 aa, synthetic construct
CGTWDISLSAAVF

SEQ ID NO: 1132 - protein, 12 aa, synthetic construct
CGTWDISLRAVF

SEQ ID NO: 1133 - protein, 13 aa, synthetic construct
CGTWDISLNTGVF

SEQ ID NO: 1134 - protein, 13 aa, synthetic construct
CGTWDISLNNYVF

SEQ ID NO: 1135 - protein, 13 aa, synthetic construct
CGTWDISLIAGVF

SEQ ID NO: 1136 - protein, 13 aa, synthetic construct
CGTWDISLHTWLF

SEQ ID NO: 1137 - protein, 14 aa, synthetic construct
CGTWDIRLTDELLF

SEQ ID NO: 1138 - protein, 13 aa, synthetic construct
CGTWDIRLSGFVF

SEQ ID NO: 1139 - protein, 16 aa, synthetic construct
CGTWDINLGAGGLYVF

SEQ ID NO: 1140 - protein, 13 aa, synthetic construct
CGTWDIILSAEVF

SEQ ID NO: 1141 - protein, 12 aa, synthetic construct
CGTWDHTLSAVF

SEQ ID NO: 1142 - protein, 13 aa, synthetic construct
CGTWDHTLLTVLF

SEQ ID NO: 1143 - protein, 13 aa, synthetic construct
CGTWDHSLTAVVF

SEQ ID NO: 1144 - protein, 13 aa, synthetic construct
CGTWDHSLTAGIF

SEQ ID NO: 1145 - protein, 13 aa, synthetic construct
CGTWDHSLSVVLF

SEQ ID NO: 1146 - protein, 12 aa, synthetic construct
CGTWDHSLSLVF

SEQ ID NO: 1147 - protein, 13 aa, synthetic construct
CGTWDHSLSIGVF

SEQ ID NO: 1148 - protein, 13 aa, synthetic construct [sequence omitted]

SEQ ID NO: 1149 - protein, 13 aa, synthetic construct
CGTWDHSLSAFVF

SEQ ID NO: 1150 - protein, 13 aa, synthetic construct
CGTWDHSLSAAVF

SEQ ID NO: 1151 - protein, 12 aa, synthetic construct
CGTWDHNLRAVF

SEQ ID NO: 1152 - protein, 13 aa, synthetic construct
CGTWDFTLSVGRF

SEQ ID NO: 1153 - protein, 13 aa, synthetic construct
CGTWDFTLSAPVF

SEQ ID NO: 1154 - protein, 14 aa, synthetic construct
CGTWDFSVSAGWVF

SEQ ID NO: 1155 - protein, 13 aa, synthetic construct
CGTWDFSLTTWLF

SEQ ID NO: 1156 - protein, 13 aa, synthetic construct
CGTWDFSLSVWVF

SEQ ID NO: 1157 - protein, 13 aa, synthetic construct
CGTWDFSLSTGVF

SEQ ID NO: 1158 - protein, 13 aa, synthetic construct
CGTWDFSLSGVVF

SEQ ID NO: 1159 - protein, 13 aa, synthetic construct
CGTWDFSLSGFVF

SEQ ID NO: 1160 - protein, 13 aa, synthetic construct [sequence omitted]

SEQ ID NO: 1161 - protein, 13 aa, synthetic construct
CGTWDETVRGWVF

SEQ ID NO: 1162 - protein, 13 aa, synthetic construct
CGTWDESLRSWVF

SEQ ID NO: 1163 - protein, 15 aa, synthetic construct
CGTWDERQTDESYVF

SEQ ID NO: 1164 - protein, 14 aa, synthetic construct
CGTWDERLVAGQVF

SEQ ID NO: 1165 - protein, 14 aa, synthetic construct
CGTWDERLSPGAFF

SEQ ID NO: 1166 - protein, 9 aa, synthetic construct
CGTWDEKVF

SEQ ID NO: 1167 - protein, 15 aa, synthetic construct
CGTWDEGQTTDFFVF

SEQ ID NO: 1168 - protein, 13 aa, synthetic construct
CGTWDDTLAGVVF

SEQ ID NO: 1169 - protein, 13 aa, synthetic construct
CGTWDDRLTSAVF

SEQ ID NO: 1170 - protein, 13 aa, synthetic construct
CGTWDDRLFVVVF

SEQ ID NO: 1171 - protein, 13 aa, synthetic construct
CGTWDDNLRGWVF

SEQ ID NO: 1172 - protein, 13 aa, synthetic construct
CGTWDDNLRGVVF

SEQ ID NO: 1173 - protein, 14 aa, synthetic construct
CGTWDDNLNIGRVF

SEQ ID NO: 1174 - protein, 13 aa, synthetic construct
CGTWDDILSAVIF

SEQ ID NO: 1175 - protein, 13 aa, synthetic construct
CGTWDDILRGWVF

SEQ ID NO: 1176 - protein, 14 aa, synthetic construct
CGTWDATLSPGWLF

SEQ ID NO: 1177 - protein, 13 aa, synthetic construct
CGTWDASVTSWVF

SEQ ID NO: 1178 - protein, 13 aa, synthetic construct
CGTWDASLTSVVF

SEQ ID NO: 1179 - protein, 13 aa, synthetic construct
CGTWDASLSVWVF

SEQ ID NO: 1180 - protein, 14 aa, synthetic construct
CGTWDASLSVPWVF

SEQ ID NO: 1181 - protein, 13 aa, synthetic construct
CGTWDASLSVAVF

SEQ ID NO: 1182 - protein, 13 aa, synthetic construct
CGTWDASLSTWVF

SEQ ID NO: 1183 - protein, 13 aa, synthetic construct
CGTWDASLSGVVF

SEQ ID NO: 1184 - protein, 14 aa, synthetic construct
CGTWDASLSGGGEF

SEQ ID NO: 1185 - protein, 13 aa, synthetic construct [sequence omitted]

SEQ ID NO: 1186 - protein, 13 aa, synthetic construct
CGTWDASLSAGLF

SEQ ID NO: 1187 - protein, 13 aa, synthetic construct [sequence omitted]

SEQ ID NO: 1188 - protein, 15 aa, synthetic construct
CGTWDASLSADFWVF

SEQ ID NO: 1189 - protein, 12 aa, synthetic construct
CGTWDASLRVFF

SEQ ID NO: 1190 - protein, 13 aa, synthetic construct
CGTWDASLRAVVL

SEQ ID NO: 1191 - protein, 13 aa, synthetic construct
CGTWDASLNIWVF

SEQ ID NO: 1192 - protein, 13 aa, synthetic construct
CGTWDASLKNLVF

SEQ ID NO: 1193 - protein, 13 aa, synthetic construct
CGTWDASLGAWVF

SEQ ID NO: 1194 - protein, 13 aa, synthetic construct
CGTWDASLGAVVF

SEQ ID NO: 1195 - protein, 13 aa, synthetic construct
CGTWDASLGAGVF

SEQ ID NO: 1196 - protein, 14 aa, synthetic construct
CGTWDARLSGLYVF

SEQ ID NO: 1197 - protein, 13 aa, synthetic construct
CGTWDARLGGAVF

SEQ ID NO: 1198 - protein, 13 aa, synthetic construct
CGTWDANLRAGVF

SEQ ID NO: 1199 - protein, 13 aa, synthetic construct
CGTWDAIISGWVF

SEQ ID NO: 1200 - protein, 13 aa, synthetic construct
CGTWDAGQSVWVF

SEQ ID NO: 1201 - protein, 14 aa, synthetic construct
CGTWDAGLTGLYVF

SEQ ID NO: 1202 - protein, 13 aa, synthetic construct
CGTWDAGLSVYVF

SEQ ID NO: 1203 - protein, 13 aa, synthetic construct
CGTWDAGLSTGVF

SEQ ID NO: 1204 - protein, 13 aa, synthetic construct
CGTWDAGLSGDVF

SEQ ID NO: 1205 - protein, 14 aa, synthetic construct
CGTWDAGLSAGYVF

SEQ ID NO: 1206 - protein, 13 aa, synthetic construct
CGTWDAGLRVWVF

SEQ ID NO: 1207 - protein, 12 aa, synthetic construct
CGTWDAGLREIF

SEQ ID NO: 1208 - protein, 13 aa, synthetic construct
CGTWASSLSSWVF

SEQ ID NO: 1209 - protein, 13 aa, synthetic construct
CGTWAGSLSGHVF

SEQ ID NO: 1210 - protein, 14 aa, synthetic construct
CGTWAGSLSAAWVF

SEQ ID NO: 1211 - protein, 14 aa, synthetic construct
CGTWAGSLNVYWVF

SEQ ID NO: 1212 - protein, 14 aa, synthetic construct
CGTWAGNLRPNWVF

SEQ ID NO: 1213 - protein, 12 aa, synthetic construct
CGTRGSLGGAVF

SEQ ID NO: 1214 - protein, 13 aa, synthetic construct
CGTRDTTLSVPVF

SEQ ID NO: 1215 - protein, 13 aa, synthetic construct
CGTRDTSLNIEIF

SEQ ID NO: 1216 - protein, 12 aa, synthetic construct
CGTRDTSLNDVF

SEQ ID NO: 1217 - protein, 13 aa, synthetic construct
CGTRDTRLSIVVF

SEQ ID NO: 1218 - protein, 13 aa, synthetic construct
CGTRDTILSAEVF

SEQ ID NO: 1219 - protein, 13 aa, synthetic construct
CGTRDRSLSGWVF

SEQ ID NO: 1220 - protein, 11 aa, synthetic construct
CGSWYYNVFLF

SEQ ID NO: 1221 - protein, 13 aa, synthetic construct
CGSWHSSLNLVVF

SEQ ID NO: 1222 - protein, 14 aa, synthetic construct
CGSWGSGLSAPYVF

SEQ ID NO: 1223 - protein, 13 aa, synthetic construct
CGSWESGLGAWLF

SEQ ID NO: 1224 - protein, 11 aa, synthetic construct
CGSWDYGLLLF

SEQ ID NO: 1225 - protein, 12 aa, synthetic construct
CGSWDVSLTAVF

SEQ ID NO: 1226 - protein, 13 aa, synthetic construct
CGSWDVSLNVGIF

SEQ ID NO: 1227 - protein, 13 aa, synthetic construct
CGSWDTTLRAWVF

SEQ ID NO: 1228 - protein, 14 aa, synthetic construct
CGSWDTSPVRAWVF

SEQ ID NO: 1229 - protein, 13 aa, synthetic construct
CGSWDTSLSVWVF

SEQ ID NO: 1230 - protein, 13 aa, synthetic construct
CGSWDTSLSAEVF

SEQ ID NO: 1231 - protein, 13 aa, synthetic construct
CGSWDTSLRAWVF

SEQ ID NO: 1232 - protein, 13 aa, synthetic construct
CGSWDTSLRAWAF

SEQ ID NO: 1233 - protein, 13 aa, synthetic construct
CGSWDTSLDARLF

SEQ ID NO: 1234 - protein, 13 aa, synthetic construct
CGSWDTILLVYVF

SEQ ID NO: 1235 - protein, 12 aa, synthetic construct
CGSWDRWQAAVF

SEQ ID NO: 1236 - protein, 13 aa, synthetic construct
CGSWDRSLSGYVF

SEQ ID NO: 1237 - protein, 13 aa, synthetic construct
CGSWDRSLSAYVF

SEQ ID NO: 1238 - protein, 13 aa, synthetic construct
CGSWDRSLSAVVF

SEQ ID NO: 1239 - protein, 13 aa, synthetic construct
CGSWDNTLGVVLF

SEQ ID NO: 1240 - protein, 13 aa, synthetic construct
CGSWDNRLSTVIF

SEQ ID NO: 1241 - protein, 13 aa, synthetic construct
CGSWDNRLNTVIF

SEQ ID NO: 1242 - protein, 14 aa, synthetic construct
CGSWDLSPVRVLVF

SEQ ID NO: 1243 - protein, 13 aa, synthetic construct
CGSWDLSLSAVVF

SEQ ID NO: 1244 - protein, 13 aa, synthetic construct
CGSWDKNLRAVLF

SEQ ID NO: 1245 - protein, 13 aa, synthetic construct
CGSWDISLSAGVF

SEQ ID NO: 1246 - protein, 13 aa, synthetic construct
CGSWDIRLSAEVF

SEQ ID NO: 1247 - protein, 13 aa, synthetic construct
CGSWDIKLNIGVF

SEQ ID NO: 1248 - protein, 13 aa, synthetic construct
CGSWDFSLNYFVF

SEQ ID NO: 1249 - protein, 13 aa, synthetic construct
CGSWDASLSTEVF

SEQ ID NO: 1250 - protein, 13 aa, synthetic construct
CGSWDAGLRGWVF

SEQ ID NO: 1251 - protein, 13 aa, synthetic construct
CGRWESSLGAVVF

SEQ ID NO: 1252 - protein, 13 aa, synthetic construct
CGRWDFSLSAYVF

SEQ ID NO: 1253 - protein, 13 aa, synthetic construct
CGQWDNDLSVWVF

SEQ ID NO: 1254 - protein, 14 aa, synthetic construct
CGPWHSSVTSGHVL

SEQ ID NO: 1255 - protein, 15 aa, synthetic construct
CGLWDASLSAPTWVF

SEQ ID NO: 1256 - protein, 13 aa, synthetic construct
CGIWHTSLSAWVF

SEQ ID NO: 1257 - protein, 13 aa, synthetic construct
CGIWDYSLDTWVF

SEQ ID NO: 1258 - protein, 13 aa, synthetic construct
CGIWDTSLSAWVF

SEQ ID NO: 1259 - protein, 13 aa, synthetic construct
CGIWDTRLSVYVF

SEQ ID NO: 1260 - protein, 13 aa, synthetic construct
CGIWDTRLSVYIF

SEQ ID NO: 1261 - protein, 12 aa, synthetic construct
CGIWDTNLGYLF

SEQ ID NO: 1262 - protein, 13 aa, synthetic construct
CGIWDTGLSAVVF

SEQ ID NO: 1263 - protein, 13 aa, synthetic construct
CGIWDRSLSAWVF

SEQ ID NO: 1264 - protein, 13 aa, synthetic construct
CGIRDTRLSVYVF

SEQ ID NO: 1265 - protein, 14 aa, synthetic construct
CGGWSSRLGVGPVF

SEQ ID NO: 1266 - protein, 13 aa, synthetic construct
CGGWGSGLSAWVF

SEQ ID NO: 1267 - protein, 13 aa, synthetic construct
CGGWDTSLSAWVF

SEQ ID NO: 1268 - protein, 13 aa, synthetic construct
CGGWDRGLDAWVF

SEQ ID NO: 1269 - protein, 11 aa, synthetic construct
CGAWRNNVWVF

SEQ ID NO: 1270 - protein, 16 aa, synthetic construct
CGAWNRRLNPHSHWVF

SEQ ID NO: 1271 - protein, 12 aa, synthetic construct
CGAWHNKLSAVF

SEQ ID NO: 1272 - protein, 13 aa, synthetic construct
CGAWGSSLRASVF

SEQ ID NO: 1273 - protein, 13 aa, synthetic construct
CGAWGSGLSAWVF

SEQ ID NO: 1274 - protein, 14 aa, synthetic construct
CGAWESSLSAPYVF

SEQ ID NO: 1275 - protein, 13 aa, synthetic construct
CGAWESSLNVGLI

SEQ ID NO: 1276 - protein, 14 aa, synthetic construct
CGAWESGRSAGVVF

SEQ ID NO: 1277 - protein, 13 aa, synthetic construct
CGAWDYSVSGWVF

SEQ ID NO: 1278 - protein, 13 aa, synthetic construct
CGAWDYSLTAGVF

SEQ ID NO: 1279 - protein, 13 aa, synthetic construct
CGAWDYRLSAVLF

SEQ ID NO: 1280 - protein, 13 aa, synthetic construct
CGAWDVRLDVGVF

SEQ ID NO: 1281 - protein, 11 aa, synthetic construct
CGAWDTYSYVF

SEQ ID NO: 1282 - protein, 13 aa, synthetic construct
CGAWDTTLSGVVF

SEQ ID NO: 1283 - protein, 13 aa, synthetic construct
CGAWDTTLSAVIF

SEQ ID NO: 1284 - protein, 14 aa, synthetic construct
CGAWDTSQGASYVF

SEQ ID NO: 1285 - protein, 14 aa, synthetic construct
CGAWDTSPVRAGVF

SEQ ID NO: 1286 - protein, 11 aa, synthetic construct
CGAWDTSLWLF

SEQ ID NO: 1287 - protein, 13 aa, synthetic construct
CGAWDTSLTVYVF

SEQ ID NO: 1288 - protein, 13 aa, synthetic construct
CGAWDTSLTAGVF

SEQ ID NO: 1289 - protein, 13 aa, synthetic construct
CGAWDTSLSTVVF

SEQ ID NO: 1290 - protein, 14 aa, synthetic construct
CGAWDTSLSSRYIF

SEQ ID NO: 1291 - protein, 13 aa, synthetic construct
CGAWDTSLSGYVF

SEQ ID NO: 1292 - protein, 13 aa, synthetic construct
CGAWDTSLSGWVF

SEQ ID NO: 1293 - protein, 13 aa, synthetic construct
CGAWDTSLSGVLF

SEQ ID NO: 1294 - protein, 13 aa, synthetic construct
CGAWDTSLSGLVF

SEQ ID NO: 1295 - protein, 13 aa, synthetic construct
CGAWDTSLSGFVF

SEQ ID NO: 1296 - protein, 13 aa, synthetic construct
CGAWDTSLSGEVF

SEQ ID NO: 1297 - protein, 13 aa, synthetic construct
CGAWDTSLSDFVF

SEQ ID NO: 1298 - protein, 13 aa, synthetic construct
CGAWDTSLRTAIF

SEQ ID NO: 1299 - protein, 11 aa, synthetic construct
CGAWDTSLRLF

SEQ ID NO: 1300 - protein, 13 aa, synthetic construct
CGAWDTSLNVHVF

SEQ ID NO: 1301 - protein, 13 aa, synthetic construct
CGAWDTSLNKWVF

SEQ ID NO: 1302 - protein, 13 aa, synthetic construct
CGAWDTRLSARLF

SEQ ID NO: 1303 - protein, 13 aa, synthetic construct
CGAWDTRLRGFIF

SEQ ID NO: 1304 - protein, 13 aa, synthetic construct
CGAWDTNLGNVLL

SEQ ID NO: 1305 - protein, 13 aa, synthetic construct
CGAWDTNLGKWVF

SEQ ID NO: 1306 - protein, 13 aa, synthetic construct
CGAWDTGLEWYVF

SEQ ID NO: 1307 - protein, 13 aa, synthetic construct
CGAWDRTSGLWLF

SEQ ID NO: 1308 - protein, 13 aa, synthetic construct
CGAWDRSLVAGLF

SEQ ID NO: 1309 - protein, 13 aa, synthetic construct
CGAWDRSLTVYVF

SEQ ID NO: 1310 - protein, 13 aa, synthetic construct
CGAWDRSLSGYVF

SEQ ID NO: 1311 - protein, 13 aa, synthetic construct
CGAWDRSLSAYVF

SEQ ID NO: 1312 - protein, 13 aa, synthetic construct [sequence omitted]

SEQ ID NO: 1313 - protein, 13 aa, synthetic construct
CGAWDRSLSAGVF

SEQ ID NO: 1314 - protein, 13 aa, synthetic construct
CGAWDRSLRIVVF

SEQ ID NO: 1315 - protein, 13 aa, synthetic construct
CGAWDRSLRAYVF

SEQ ID NO: 1316 - protein, 13 aa, synthetic construct
CGAWDRSLNVWLF

SEQ ID NO: 1317 - protein, 14 aa, synthetic construct
CGAWDRGLNVGWLF

SEQ ID NO: 1318 - protein, 13 aa, synthetic construct
CGAWDNRLSILAF

SEQ ID NO: 1319 - protein, 13 aa, synthetic construct
CGAWDNDLTAYVF

SEQ ID NO: 1320 - protein, 12 aa, synthetic construct
CGAWDFSLTPLF

SEQ ID NO: 1321 - protein, 15 aa, synthetic construct
CGAWDDYRGVSIYVF

SEQ ID NO: 1322 - protein, 14 aa, synthetic construct
CGAWDDRPSSAVVF

SEQ ID NO: 1323 - protein, 13 aa, synthetic construct
CGAWDDRLTVVVF

SEQ ID NO: 1324 - protein, 12 aa, synthetic construct
CGAWDDRLGAVF

SEQ ID NO: 1325 - protein, 14 aa, synthetic construct
CGAWDASLNPGRAF

SEQ ID NO: 1326 - protein, 12 aa, synthetic construct
CGAWDAGLREIF

SEQ ID NO: 1327 - protein, 13 aa, synthetic construct
CGAWAGSPSPWVF

SEQ ID NO: 1328 - protein, 13 aa, synthetic construct
CGAFDTTLSAGVF

SEQ ID NO: 1329 - protein, 13 aa, synthetic construct
CETWESSLSVGVF

SEQ ID NO: 1330 - protein, 13 aa, synthetic construct
CETWESSLRVWVF

SEQ ID NO: 1331 - protein, 13 aa, synthetic construct
CETWDTSLSGGVF

SEQ ID NO: 1332 - protein, 14 aa, synthetic construct
CETWDTSLSDFYVF

SEQ ID NO: 1333 - protein, 12 aa, synthetic construct
CETWDTSLSALF

SEQ ID NO: 1334 - protein, 13 aa, synthetic construct [sequence omitted]

SEQ ID NO: 1335 - protein, 13 aa, synthetic construct
CETWDTSLNVVVF

SEQ ID NO: 1336 - protein, 13 aa, synthetic construct
CETWDTSLGAVVF

SEQ ID NO: 1337 - protein, 13 aa, synthetic construct
CETWDRSLSGVVF

SEQ ID NO: 1338 - protein, 13 aa, synthetic construct
CETWDRSLSAWVF

SEQ ID NO: 1339 - protein, 13 aa, synthetic construct [sequence omitted]

SEQ ID NO: 1340 - protein, 13 aa, synthetic construct
CETWDRGLSVVVF

SEQ ID NO: 1341 - protein, 13 aa, synthetic construct
CETWDRGLSAVVF

SEQ ID NO: 1342 - protein, 13 aa, synthetic construct
CETWDHTLSVVIF

SEQ ID NO: 1343 - protein, 13 aa, synthetic construct
CETWDASLTVVLF

SEQ ID NO: 1344 - protein, 13 aa, synthetic construct
CETWDASLSAGVF

SEQ ID NO: 1345 - protein, 13 aa, synthetic construct
CETWDAGLSEVVF

SEQ ID NO: 1346 - protein, 13 aa, synthetic construct
CETFDTSLSVVVF

SEQ ID NO: 1347 - protein, 13 aa, synthetic construct
CETFDTSLNIVVF

SEQ ID NO: 1348 - protein, 13 aa, synthetic construct
CESWDRSRIGVVF

SEQ ID NO: 1349 - protein, 13 aa, synthetic construct
CESWDRSLSARVY

SEQ ID NO: 1350 - protein, 13 aa, synthetic construct
CESWDRSLRAVVF

SEQ ID NO: 1351 - protein, 12 aa, synthetic construct
CESWDRSLIVVF

SEQ ID NO: 1352 - protein, 13 aa, synthetic construct
CESWDNNLNEVVF

SEQ ID NO: 1353 - protein, 15 aa, synthetic construct
CEIWESSPSADDLVF

SEQ ID NO: 1354 - protein, 13 aa, synthetic construct
CEAWDTSLSGAVF

SEQ ID NO: 1355 - protein, 13 aa, synthetic construct
CEAWDTSLSAGVF

SEQ ID NO: 1356 - protein, 13 aa, synthetic construct
CEAWDTSLGGGVF

SEQ ID NO: 1357 - protein, 13 aa, synthetic construct
CEAWDRSLTGSLF

SEQ ID NO: 1358 - protein, 13 aa, synthetic construct
CEAWDRGLSAVVF

SEQ ID NO: 1359 - protein, 13 aa, synthetic construct
CEAWDNILSTVVF

SEQ ID NO: 1360 - protein, 13 aa, synthetic construct
CEAWDISLSAGVF

SEQ ID NO: 1361 - protein, 13 aa, synthetic construct
CEAWDADLSGAVF

SEQ ID NO: 1362 - protein, 15 aa, synthetic construct
CATWTGSFRTGHYVF

SEQ ID NO: 1363 - protein, 13 aa, synthetic construct
CATWSSSPRGWVF

SEQ ID NO: 1364 - protein, 14 aa, synthetic construct
CATWHYSLSAGRVF

SEQ ID NO: 1365 - protein, 13 aa, synthetic construct
CATWHTSLSIVQF

SEQ ID NO: 1366 - protein, 14 aa, synthetic construct
CATWHSTLSADVLF

SEQ ID NO: 1367 - protein, 14 aa, synthetic construct
CATWHSSLSAGRLF

SEQ ID NO: 1368 - protein, 13 aa, synthetic construct
CATWHIARSAWVF

SEQ ID NO: 1369 - protein, 13 aa, synthetic construct
CATWGSSQSAVVF

SEQ ID NO: 1370 - protein, 14 aa, synthetic construct
CATWGSSLSAGGVF

SEQ ID NO: 1371 - protein, 13 aa, synthetic construct
CATWEYSLSVVLF

SEQ ID NO: 1372 - protein, 14 aa, synthetic construct
CATWETTRRASFVF

SEQ ID NO: 1373 - protein, 13 aa, synthetic construct
CATWETSLNVYVF

SEQ ID NO: 1374 - protein, 13 aa, synthetic construct
CATWETSLNVVVF

SEQ ID NO: 1375 - protein, 13 aa, synthetic construct
CATWETSLNLYVF

SEQ ID NO: 1376 - protein, 14 aa, synthetic construct
CATWETGLSAGEVF

SEQ ID NO: 1377 - protein, 13 aa, synthetic construct
CATWESTLSVVVF

SEQ ID NO: 1378 - protein, 13 aa, synthetic construct
CATWESSLSIFVF

SEQ ID NO: 1379 - protein, 14 aa, synthetic construct
CATWESSLNTFYVF

SEQ ID NO: 1380 - protein, 15 aa, synthetic construct
CATWESRVDTRGLLF

SEQ ID NO: 1381 - protein, 14 aa, synthetic construct
CATWESGLSGAGVF

SEQ ID NO: 1382 - protein, 14 aa, synthetic construct
CATWEGSLNTFYVF

SEQ ID NO: 1383 - protein, 13 aa, synthetic construct [sequence omitted]

SEQ ID NO: 1384 - protein, 13 aa, synthetic construct
CATWDYRLSIVVF

SEQ ID NO: 1385 - protein, 13 aa, synthetic construct
CATWDYNLGAAVF

SEQ ID NO: 1386 - protein, 13 aa, synthetic construct
CATWDVTLGVLHF

SEQ ID NO: 1387 - protein, 13 aa, synthetic construct
CATWDTTLSVWVF

SEQ ID NO: 1388 - protein, 13 aa, synthetic construct
CATWDTTLSVVLF

SEQ ID NO: 1389 - protein, 13 aa, synthetic construct
CATWDTTLSVEVF

SEQ ID NO: 1390 - protein, 16 aa, synthetic construct
CATWDTSPSLSGFWVF

SEQ ID NO: 1391 - protein, 13 aa, synthetic construct
CATWDTSLTGVVF

SEQ ID NO: 1392 - protein, 13 aa, synthetic construct
CATWDTSLTGAVF

SEQ ID NO: 1393 - protein, 13 aa, synthetic construct
CATWDTSLTAWVF

SEQ ID NO: 1394 - protein, 13 aa, synthetic construct
CATWDTSLTAVVF

SEQ ID NO: 1395 - protein, 13 aa, synthetic construct
CATWDTSLTAKVF

SEQ ID NO: 1396 - protein, 13 aa, synthetic construct
CATWDTSLSVVVF

SEQ ID NO: 1397 - protein, 13 aa, synthetic construct [sequence omitted]

SEQ ID NO: 1398 - protein, 13 aa, synthetic construct
CATWDTSLSSWVF

SEQ ID NO: 1399 - protein, 13 aa, synthetic construct
CATWDTSLSGGVL

SEQ ID NO: 1400 - protein, 13 aa, synthetic construct [sequence omitted]

SEQ ID NO: 1401 - protein, 14 aa, synthetic construct
CATWDTSLSGGRVF

SEQ ID NO: 1402 - protein, 14 aa, synthetic construct
CATWDTSLSGDRVF

SEQ ID NO: 1403 - protein, 13 aa, synthetic construct
CATWDTSLSEGVF

SEQ ID NO: 1404 - protein, 13 aa, synthetic construct
CATWDTSLSAVVL

SEQ ID NO: 1405 - protein, 12 aa, synthetic construct
CATWDTSLSAVF

SEQ ID NO: 1406 - protein, 13 aa, synthetic construct
CATWDTSLSARVF

SEQ ID NO: 1407 - protein, 12 aa, synthetic construct
CATWDTSLSALF

SEQ ID NO: 1408 - protein, 13 aa, synthetic construct
CATWDTSLSAHVF

SEQ ID NO: 1409 - protein, 14 aa, synthetic construct
CATWDTSLSAGRVF

SEQ ID NO: 1410 - protein, 13 aa, synthetic construct
CATWDTSLSAEVF

SEQ ID NO: 1411 - protein, 17 aa, synthetic construct
CATWDTSLSADAGGGVF

SEQ ID NO: 1412 - protein, 13 aa, synthetic construct
CATWDTSLRVVVF

SEQ ID NO: 1413 - protein, 12 aa, synthetic construct
CATWDTSLRGVF

SEQ ID NO: 1414 - protein, 13 aa, synthetic construct
CATWDTSLPAWVF

SEQ ID NO: 1415 - protein, 13 aa, synthetic construct
CATWDTSLNVGVF

SEQ ID NO: 1416 - protein, 13 aa, synthetic construct
CATWDTSLGIVLF

SEQ ID NO: 1417 - protein, 14 aa, synthetic construct
CATWDTSLGARVVF

SEQ ID NO: 1418 - protein, 12 aa, synthetic construct
CATWDTSLGALF

SEQ ID NO: 1419 - protein, 13 aa, synthetic construct
CATWDTSLATGLF

SEQ ID NO: 1420 - protein, 13 aa, synthetic construct
CATWDTSLAAWVF

SEQ ID NO: 1421 - protein, 13 aa, synthetic construct
CATWDTRLSAVVF

SEQ ID NO: 1422 - protein, 13 aa, synthetic construct [sequence omitted]

SEQ ID NO: 1423 - protein, 13 aa, synthetic construct
CATWDTRLLITVF

SEQ ID NO: 1424 - protein, 13 aa, synthetic construct
CATWDTLLSVELF

SEQ ID NO: 1425 - protein, 14 aa, synthetic construct
CATWDTGRNPHVVF

SEQ ID NO: 1426 - protein, 13 aa, synthetic construct
CATWDTGLSSVLF

SEQ ID NO: 1427 - protein, 12 aa, synthetic construct
CATWDTGLSAVF

SEQ ID NO: 1428 - protein, 13 aa, synthetic construct
CATWDRTLSIGVF

SEQ ID NO: 1429 - protein, 13 aa, synthetic construct
CATWDRSVTAVLF

SEQ ID NO: 1430 - protein, 13 aa, synthetic construct [sequence omitted]

SEQ ID NO: 1431 - protein, 13 aa, synthetic construct [sequence omitted]

SEQ ID NO: 1432 - protein, 15 aa, synthetic construct
CATWDRSLSAVPWVF

SEQ ID NO: 1433 - protein, 13 aa, synthetic construct [sequence omitted]

SEQ ID NO: 1434 - protein, 13 aa, synthetic construct
CATWDRSLRAGVF

SEQ ID NO: 1435 - protein, 13 aa, synthetic construct
CATWDRSLNVYVL

SEQ ID NO: 1436 - protein, 13 aa, synthetic construct
CATWDRILSAEVF

SEQ ID NO: 1437 - protein, 13 aa, synthetic construct
CATWDRGLSTGVF

SEQ ID NO: 1438 - protein, 13 aa, synthetic construct
CATWDNYLGAAVF

SEQ ID NO: 1439 - protein, 14 aa, synthetic construct
CATWDNTPSNIVVF

SEQ ID NO: 1440 - protein, 13 aa, synthetic construct
CATWDNTLSVWVF

SEQ ID NO: 1441 - protein, 14 aa, synthetic construct
CATWDNTLSVNWVF

SEQ ID NO: 1442 - protein, 14 aa, synthetic construct
CATWDNTLNVFYVF

SEQ ID NO: 1443 - protein, 13 aa, synthetic construct
CATWDNRLSSVVF

SEQ ID NO: 1444 - protein, 13 aa, synthetic construct
CATWDNRLSAGVL

SEQ ID NO: 1445 - protein, 13 aa, synthetic construct
CATWDNRLSAGVF

SEQ ID NO: 1446 - protein, 11 aa, synthetic construct
CATWDNRDWVF

SEQ ID NO: 1447 - protein, 13 aa, synthetic construct
CATWDNNLGAGVF

SEQ ID NO: 1448 - protein, 13 aa, synthetic construct
CATWDNKLTSGVF

SEQ ID NO: 1449 - protein, 13 aa, synthetic construct
CATWDNILSAWVF

SEQ ID NO: 1450 - protein, 13 aa, synthetic construct
CATWDNDIHSGLF

SEQ ID NO: 1451 - protein, 12 aa, synthetic construct
CATWDLSLSALF

SEQ ID NO: 1452 - protein, 13 aa, synthetic construct
CATWDITLSAEVF

SEQ ID NO: 1453 - protein, 14 aa, synthetic construct
CATWDISPSAGGVF

SEQ ID NO: 1454 - protein, 15 aa, synthetic construct
CATWDISLSTGRAVF

SEQ ID NO: 1455 - protein, 12 aa, synthetic construct
CATWDISLSQVF

SEQ ID NO: 1456 - protein, 13 aa, synthetic construct
CATWDIRLSSGVF

SEQ ID NO: 1457 - protein, 14 aa, synthetic construct
CATWDIGPSAGGVF

SEQ ID NO: 1458 - protein, 13 aa, synthetic construct
CATWDHSRAGVLF

SEQ ID NO: 1459 - protein, 14 aa, synthetic construct
CATWDHSPSVGEVF

SEQ ID NO: 1460 - protein, 13 aa, synthetic construct
CATWDHSLRVGVF

SEQ ID NO: 1461 - protein, 13 aa, synthetic construct
CATWDHSLNIGVF

SEQ ID NO: 1462 - protein, 13 aa, synthetic construct
CATWDHSLGLWAF

SEQ ID NO: 1463 - protein, 12 aa, synthetic construct
CATWDHNLRLVF

SEQ ID NO: 1464 - protein, 13 aa, synthetic construct
CATWDHILASGVF

SEQ ID NO: 1465 - protein, 13 aa, synthetic construct
CATWDFSLSVWVF

SEQ ID NO: 1466 - protein, 13 aa, synthetic construct
CATWDFSLSAWVF

SEQ ID NO: 1467 - protein, 13 aa, synthetic construct
CATWDDTLTAGVF

SEQ ID NO: 1468 - protein, 13 aa, synthetic construct
CATWDDRLSAVLF

SEQ ID NO: 1469 - protein, 13 aa, synthetic construct
CATWDDRLDAAVF

SEQ ID NO: 1470 - protein, 13 aa, synthetic construct
CATWDATLNTGVF

SEQ ID NO: 1471 - protein, 13 aa, synthetic construct
CATWDASLSVWLL

SEQ ID NO: 1472 - protein, 13 aa, synthetic construct [sequence omitted]

SEQ ID NO: 1473 - protein, 13 aa, synthetic construct
CATRDTTLSAVLF

SEQ ID NO: 1474 - protein, 13 aa, synthetic construct
CATLGSSLSLWVF

SEQ ID NO: 1475 - protein, 13 aa, synthetic construct
CATIETSLPAWVF

SEQ ID NO: 1476 - protein, 13 aa, synthetic construct
CATGDRSLTVEVF

SEQ ID NO: 1477 - protein, 12 aa, synthetic construct
CATGDLGLTIVF

SEQ ID NO: 1478 - protein, 14 aa, synthetic construct
CASWDYRGRSGWVF

SEQ ID NO: 1479 - protein, 13 aa, synthetic construct
CASWDTTLNVGVF

SEQ ID NO: 1480 - protein, 13 aa, synthetic construct
CASWDTTLGFVLF

SEQ ID NO: 1481 - protein, 14 aa, synthetic construct
CASWDTSLSGGYVF

SEQ ID NO: 1482 - protein, 13 aa, synthetic construct
CASWDTSLRAGVF

SEQ ID NO: 1483 - protein, 13 aa, synthetic construct
CASWDTSLGAGVF

SEQ ID NO: 1484 - protein, 13 aa, synthetic construct
CASWDRGLSAVVF

SEQ ID NO: 1485 - protein, 13 aa, synthetic construct
CASWDNVLRGVVF

SEQ ID NO: 1486 - protein, 13 aa, synthetic construct
CASWDNRLTAVVF

SEQ ID NO: 1487 - protein, 12 aa, synthetic construct
CASWDASLSVAF

SEQ ID NO: 1488 - protein, 13 aa, synthetic construct
CASWDAGLSSYVF

SEQ ID NO: 1489 - protein, 13 aa, synthetic construct
CASGDTSLSGVIF

SEQ ID NO: 1490 - protein, 13 aa, synthetic construct
CARWHTSLSIWVF

SEQ ID NO: 1491 - protein, 15 aa, synthetic construct
CAIWDTGLSPGQVAF

SEQ ID NO: 1492 - protein, 13 aa, synthetic construct
CAAWHSGLGLPVF

SEQ ID NO: 1493 - protein, 13 aa, synthetic construct
CAAWDYSLSAGVF

SEQ ID NO: 1494 - protein, 13 aa, synthetic construct
CAAWDTTLRVRLF

SEQ ID NO: 1495 - protein, 13 aa, synthetic construct
CAAWDTSLTAWVF

SEQ ID NO: 1496 - protein, 13 aa, synthetic construct
CAAWDTSLSGGVF

SEQ ID NO: 1497 - protein, 14 aa, synthetic construct
CAAWDTSLSGEAVF

SEQ ID NO: 1498 - protein, 13 aa, synthetic construct
CAAWDTSLSGAVF

SEQ ID NO: 1499 - protein, 13 aa, synthetic construct
CAAWDTSLSAWVF

SEQ ID NO: 1500 - protein, 13 aa, synthetic construct
CAAWDTSLSAGVF

SEQ ID NO: 1501 - protein, 13 aa, synthetic construct
CAAWDTSLDTYVF

SEQ ID NO: 1502 - protein, 13 aa, synthetic construct
CAAWDTRLSGVLF

SEQ ID NO: 1503 - protein, 13 aa, synthetic construct
CAAWDTRLSAGVF

SEQ ID NO: 1504 - protein, 13 aa, synthetic construct
CAAWDRSLSTGVF

SEQ ID NO: 1505 - protein, 12 aa, synthetic construct
CAAWDIRRSVLF

SEQ ID NO: 1506 - protein, 12 aa, synthetic construct
CAAWDHTQRLSF

SEQ ID NO: 1507 - protein, 14 aa, synthetic construct
CAAWDHSLSAGQVF

SEQ ID NO: 1508 - protein, 13 aa, synthetic construct
CAAVDTGLKEWVF

SEQ ID NO: 1509 - DNA, 39 bp, synthetic construct
  source 1..39: mol_type = other DNA
tgcggaacatgggataccagcctgagtgctgtggtgttc

SEQ ID NO: 1510 - DNA, 39 bp, synthetic construct
  source 1..39: mol_type = other DNA
tgcggaacatgggataccagcctgagtgctggggtgttc

SEQ ID NO: 1511 - DNA, 39 bp, synthetic construct
  source 1..39: mol_type = other DNA
tgcggaacatgggataccagcctgagtgcttgggtgttc

SEQ ID NO: 1512 - DNA, 39 bp, synthetic construct
  source 1..39: mol_type = other DNA
tgcggaacatgggataggagcctgagtgcgggggtgttc

SEQ ID NO: 1513 - DNA, 39 bp, synthetic construct
  source 1..39: mol_type = other DNA
tgcggaacatgggataggagcctgagtgcttgggtattt

SEQ ID NO: 1514 - DNA, 39 bp, synthetic construct
  source 1..39: mol_type = other DNA
tgcggaacatgggataccagcctgagtggtggggtgttc

SEQ ID NO: 1515 - DNA, 39 bp, synthetic construct
  source 1..39: mol_type = other DNA
tgcggaacatgggatactagcctgcgtgctggcgtcttc

SEQ ID NO: 1516 - DNA, 39 bp, synthetic construct
  source 1..39: mol_type = other DNA
tgcggaacatgggataggagcctgagtgtttgggtgttc

SEQ ID NO: 1517 - DNA, 39 bp, synthetic construct
  source 1..39: mol_type = other DNA
tgcggaacatgggataccagtctgagtgttgtggtcttc

SEQ ID NO: 1518 - DNA, 39 bp, synthetic construct
  source 1..39: mol_type = other DNA
tgcggaacgtgggataccagcctgagtgctgcggtgttc

SEQ ID NO: 1519 - DNA, 39 bp, synthetic construct
  source 1..39: mol_type = other DNA
tgcggagcatgggataccagcctgagtgctggagtgttc

SEQ ID NO: 1520 - DNA, 39 bp, synthetic construct
  source 1..39: mol_type = other DNA
tgcgcaacatgggataccagcctgagtgctgtggtattc

SEQ ID NO: 1521 - DNA, 39 bp, synthetic construct
  source 1..39: mol_type = other DNA
tgcgcaacatgggataccagcctgagtgctggtgtgttc

SEQ ID NO: 1522 - DNA, 39 bp, synthetic construct
  source 1..39: mol_type = other DNA
tgtggaacatgggagagcagcctgagtgcttgggtgttc

SEQ ID NO: 1523 - DNA, 39 bp, synthetic construct
  source 1..39: mol_type = other DNA
tgcggaacatgggataccaccctgagtgcgggtgtcttc

SEQ ID NO: 1524 - DNA, 39 bp, synthetic construct
  source 1..39: mol_type = other DNA
tgcggaacatgggatactagcctgagtgtgtgggtgttc

SEQ ID NO: 1525 - DNA, 39 bp, synthetic construct
  source 1..39: mol_type = other DNA
tgcggaacatgggatactagcctgagtgttggggtgttc

SEQ ID NO: 1526 - DNA, 39 bp, synthetic construct
  source 1..39: mol_type = other DNA
tgcggaacatgggacaccagtctgagcactggcgtcttc

SEQ ID NO: 1527 - DNA, 39 bp, synthetic construct
  source 1..39: mol_type = other DNA
tgcggaacatgggataccagcctgagtggtgtggtcttc

SEQ ID NO: 1528 - DNA, 39 bp, synthetic construct
  source 1..39: mol_type = other DNA
tgcggaacatgggataccagcctgagtgcttatgtcttc

SEQ ID NO: 1529 - DNA, 39 bp, synthetic construct
  source 1..39: mol_type = other DNA
tgcggaacatgggataccagcctgagtgctgaggtgttc

SEQ ID NO: 1530 - DNA, 39 bp, synthetic construct
  source 1..39: mol_type = other DNA
tgcggaacatgggataccggcctgagtgctggggtattc

SEQ ID NO: 1531 - DNA, 39 bp, synthetic construct
  source 1..39: mol_type = other DNA
tgcggaacgtgggataggagcctgagtgcttatgtcttc

SEQ ID NO: 1532 - DNA, 39 bp, synthetic construct
  source 1..39: mol_type = other DNA
tgcggaacatgggataggagcctcagtgccgtggtattc

SEQ ID NO: 1533 - DNA, 39 bp, synthetic construct
  source 1..39: mol_type = other DNA
tgcggaacatgggataacaccctgagtgcgtgggtgttc

SEQ ID NO: 1534 - DNA, 39 bp, synthetic construct
  source 1..39: mol_type = other DNA
tgcggaacatgggataacaggctgagtgctggggtgttc

SEQ ID NO: 1535 - DNA, 39 bp, synthetic construct
  source 1..39: mol_type = other DNA
tgcggaacatgggacatcagcctgagtgcttgggtgttc

SEQ ID NO: 1536 - DNA, 39 bp, synthetic construct
  source 1..39: mol_type = other DNA
tgcggaacatggcatagcagcctgagtgctggggtattc

SEQ ID NO: 1537 - DNA, 39 bp, synthetic construct
  source 1..39: mol_type = other DNA
tgcggaacatggggtagcagtttgagtgcttgggtgttc

SEQ ID NO: 1538 - DNA, 39 bp, synthetic construct
  source 1..39: mol_type = other DNA
tgcggaacatgggagagcagcctgagtggttgggtgttc

SEQ ID NO: 1539 - DNA, 39 bp, synthetic construct
  source 1..39: mol_type = other DNA
tgcggaacatgggagagcagcctgagtgctgtggttttc

SEQ ID NO: 1540 - DNA, 39 bp, synthetic construct
  source 1..39: mol_type = other DNA
tgcggaacatgggattacagcctgagtgctgtggtattc

SEQ ID NO: 1541 - DNA, 39 bp, synthetic construct
  source 1..39: mol_type = other DNA
tgcggaacatgggattacagcctgagtgctggggtattc

SEQ ID NO: 1542 - DNA, 39 bp, synthetic construct
  source 1..39: mol_type = other DNA
tgcggaacatgggatgtcagcctgagtgttggagtgttc

SEQ ID NO: 1543 - DNA, 39 bp, synthetic construct
  source 1..39: mol_type = other DNA
tgcggaacatgggataccaccctgagtgctgtggttttc

SEQ ID NO: 1544 - DNA, 39 bp, synthetic construct
  source 1..39: mol_type = other DNA
tgcggaacatgggataccactctgaatattggggtgttc

SEQ ID NO: 1545 - DNA, 39 bp, synthetic construct
  source 1..39: mol_type = other DNA
tgcggaacatgggataccagcctgactgctgtggtattc

SEQ ID NO: 1546 - DNA, 39 bp, synthetic construct
  source 1..39: mol_type = other DNA
tgcggaacctgggataccagcctgactgctgctgtgttc

SEQ ID NO: 1547 - DNA, 39 bp, synthetic construct
  source 1..39: mol_type = other DNA
tgcggcacatgggataccagcctgagtgtggggctattc

SEQ ID NO: 1548 - DNA, 39 bp, synthetic construct
  source 1..39: mol_type = other DNA
tgcggaacctgggataccagcctgagtggtagggtgttc

SEQ ID NO: 1549 - DNA, 39 bp, synthetic construct
  source 1..39: mol_type = other DNA
tgcggaacatgggataccagcctgagtggtgcagtgttc

SEQ ID NO: 1550 - DNA, 39 bp, synthetic construct
  source 1..39: mol_type = other DNA
tgcggaacatgggataccagcctgagtgctggcctgttc

SEQ ID NO: 1551 - DNA, 42 bp, synthetic construct
  source 1..42: mol_type = other DNA
tgcggaacatgggataccagcctgagtgctggaggggtcttc

SEQ ID NO: 1552 - DNA, 39 bp, synthetic construct
  source 1..39: mol_type = other DNA
tgcggaacatgggataccagcctgcgtgcttatgtcttc

SEQ ID NO: 1553 - DNA, 39 bp, synthetic construct
  source 1..39: mol_type = other DNA
tgcggaacatgggatactagtttgcgtgcttgggtattc

SEQ ID NO: 1554 - DNA, 39 bp, synthetic construct
  source 1..39: mol_type = other DNA
tgcggaacatgggataccagcctgaatactggggtattc

SEQ ID NO: 1555 - DNA, 39 bp, synthetic construct
  source 1..39: mol_type = other DNA
tgcggaacatgggataccagcctgaatatttgggtgttc

SEQ ID NO: 1556 - DNA, 39 bp, synthetic construct
  source 1..39: mol_type = other DNA
tgcggaacatgggatacaagcctgaatattggggtgttc

SEQ ID NO: 1557 - DNA, 39 bp, synthetic construct
  source 1..39: mol_type = other DNA
tgcggaacatgggataccagcctgattgctgtggtgttc

SEQ ID NO: 1558 - DNA, 39 bp, synthetic construct
  source 1..39: mol_type = other DNA
tgcggaacgtgggataggagcctgagtggttgggtgttc

SEQ ID NO: 1559 - DNA, 39 bp, synthetic construct
  source 1..39: mol_type = other DNA
tgcggaacatgggataacaggctgagtggttgggtgttc

SEQ ID NO: 1560 - DNA, 39 bp, synthetic construct
  source 1..39: mol_type = other DNA
tgcggaacgtgggataagagcctgagtgctgtggtcttc

SEQ ID NO: 1561 - DNA, 39 bp, synthetic construct
  source 1..39: mol_type = other DNA
tgcggaacatgggataaaggcctgagtgcttgggtgttc

SEQ ID NO: 1562 - DNA, 39 bp, synthetic construct
  source 1..39: mol_type = other DNA
tgcggaacatgggatatcagcctgagtgctggggtgttc

SEQ ID NO: 1563 - DNA, 45 bp, synthetic construct
  source 1..45: mol_type = other DNA
tgcggaacatgggatgagagcctgagtggtggcgaggtggtcttc

SEQ ID NO: 1564 - DNA, 39 bp, synthetic construct
  source 1..39: mol_type = other DNA
tgcggaacatgggatgccagcctgagtgcctgggtgttc

SEQ ID NO: 1565 - DNA, 39 bp, synthetic construct
  source 1..39: mol_type = other DNA
tgcggaacttgggatgccggcctgagtgcttgggtgttc

SEQ ID NO: 1566 - DNA, 39 bp, synthetic construct
  source 1..39: mol_type = other DNA
tgcggagcatgggataccagcctgagtgcttgggtgttc

SEQ ID NO: 1567 - DNA, 39 bp, synthetic construct
  source 1..39: mol_type = other DNA
tgcggagcatgggataccagcctgagtgctgtggtgttc

SEQ ID NO: 1568 - DNA, 39 bp, synthetic construct
  source 1..39: mol_type = other DNA
tgcggagcatgggataccagcctgcgtgctggggttttc

SEQ ID NO: 1569 - DNA, 39 bp, synthetic construct
  source 1..39: mol_type = other DNA
tgcgcaacatgggataccagcgtgagtgcttgggtgttc

SEQ ID NO: 1570 - DNA, 39 bp, synthetic construct
  source 1..39: mol_type = other DNA
tgcgcaacatgggataccagcctgagtgcgtgggtgttc

SEQ ID NO: 1571 - DNA, 39 bp, synthetic construct
  source 1..39: mol_type = other DNA
tgcgcaacatgggacaacaccctgagtgctggggtgttc

SEQ ID NO: 1572 - DNA, 39 bp, synthetic construct
  source 1..39: mol_type = other DNA
tgcgcagcatgggataggagcctgagtgtttgggtgttc

SEQ ID NO: 1573 - DNA, 39 bp, synthetic construct
  source 1..39: mol_type = other DNA
tgctacacatggcattccagtctgcgtggtggggtgttc

SEQ ID NO: 1574 - DNA, 39 bp, synthetic construct
  source 1..39: mol_type = other DNA
tgcgtaacgtggactagtagcccgagtgcttgggtgttc

SEQ ID NO: 1575 - DNA, 33 bp, synthetic construct
  source 1..33: mol_type = other DNA
tgcgtgacatggcgtggtggccttgtgttgttc

SEQ ID NO: 1576 - DNA, 39 bp, synthetic construct
  source 1..39: mol_type = other DNA
tgcgtaacatgggataccagcctgacttctgtggtactc

SEQ ID NO: 1577 - DNA, 42 bp, synthetic construct
  source 1..42: mol_type = other DNA
tgcgtaacatgggataccagcctgagtgtttattgggtgttc

SEQ ID NO: 1578 - DNA, 39 bp, synthetic construct
  source 1..39: mol_type = other DNA
tgcgttacatgggataccagcctgagtgcctgggtgttc

SEQ ID NO: 1579 - DNA, 39 bp, synthetic construct
  source 1..39: mol_type = other DNA
tgcgtcacatgggataccgacctcagcgttgcgctcttc

SEQ ID NO: 1580 - DNA, 39 bp, synthetic construct
  source 1..39: mol_type = other DNA
tgcgtaacatgggataggagcctgagtggttgggtgttc

SEQ ID NO: 1581 - DNA, 39 bp, synthetic construct
  source 1..39: mol_type = other DNA
tgcgtaacatgggatcgcagcctgagagaggtgttattc

SEQ ID NO: 1582 - DNA, 39 bp, synthetic construct
  source 1..39: mol_type = other DNA
tgcgtaacatgggatcgcagcctgagagcggtggtattc

SEQ ID NO: 1583 - DNA, 39 bp, synthetic construct
  source 1..39: mol_type = other DNA
tgcgtaacatgggacaggagcctcgatgctggggttttc

SEQ ID NO: 1584 - DNA, 39 bp, synthetic construct
  source 1..39: mol_type = other DNA
tgcgtgacatgggataacaccctgagtgctggggtcttc

SEQ ID NO: 1585 - DNA, 39 bp, synthetic construct
  source 1..39: mol_type = other DNA
tgcgtaacatgggataacaacctgtttggtgtggtcttc

SEQ ID NO: 1586 - DNA, 39 bp, synthetic construct
  source 1..39: mol_type = other DNA
tgcgtatcatgggataccagcctgagtggtgcggtattc

SEQ ID NO: 1587 - DNA, 39 bp, synthetic construct
  source 1..39: mol_type = other DNA
tgcgtctcatgggataccagcctgagtgctggggtattc

SEQ ID NO: 1588 - DNA, 39 bp, synthetic construct
  source 1..39: mol_type = other DNA
tgcacaacatggtttaggactccgagtgatgtggtcttc

SEQ ID NO: 1589 - DNA, 39 bp, synthetic construct
  source 1..39: mol_type = other DNA
tgcacaacatggtttaggactgcgagtgatgtggtcttc

SEQ ID NO: 1590 - DNA, 36 bp, synthetic construct
  source 1..36: mol_type = other DNA
tgcacaacgtgggattacggtctgagtgtcgtcttc

SEQ ID NO: 1591 - DNA, 42 bp, synthetic construct
  source 1..42: mol_type = other DNA
tgcacagcaagggataccagcctgagtcctggcggggtcttc

SEQ ID NO: 1592 - DNA, 39 bp, synthetic construct
  source 1..39: mol_type = other DNA
tgctcaacatggaatacgaggccgagtgatgtggtgttc

SEQ ID NO: 1593 - DNA, 39 bp, synthetic construct
  source 1..39: mol_type = other DNA
tgttcaacatgggagagcagtttgactactgtggtcttc

SEQ ID NO: 1594 - DNA, 39 bp, synthetic construct
  source 1..39: mol_type = other DNA
tgctcaacatgggataccagcctcactaatgtgctattc

SEQ ID NO: 1595 - DNA, 39 bp, synthetic construct
  source 1..39: mol_type = other DNA
tgctcaacatgggataccagcctgagtggagtagtcttc

SEQ ID NO: 1596 - DNA, 39 bp, synthetic construct
  source 1..39: mol_type = other DNA
tgctcaacatgggatcacagcctgaaagctgcactgttc

SEQ ID NO: 1597 - DNA, 39 bp, synthetic construct
  source 1..39: mol_type = other DNA
tgctcaacctgggatgcgaggctgagtgtccgggtgttc

SEQ ID NO: 1598 - DNA, 36 bp, synthetic construct
  source 1..36: mol_type = other DNA
tgctcctcatatacaagcagcagcacttgggtgttc

SEQ ID NO: 1599 - DNA, 39 bp, synthetic construct
  source 1..39: mol_type = other DNA
tgcagctcatacgcaacccgcggccttcgtgtgttgttc

SEQ ID NO: 1600 - DNA, 39 bp, synthetic construct
  source 1..39: mol_type = other DNA
tgttcatcatgggacgccaccctgagtgttcgcatattc

SEQ ID NO: 1601 - DNA, 39 bp, synthetic construct
  source 1..39: mol_type = other DNA
tgtcaggtgtgggagggtagtagtgatcattgggtgttc

SEQ ID NO: 1602 - DNA, 39 bp, synthetic construct
  source 1..39: mol_type = other DNA
tgccaaacctgggataacagactgagtgctgtggtgttc

SEQ ID NO: 1603 - DNA, 39 bp, synthetic construct
  source 1..39: mol_type = other DNA
tgtcaaacgtgggatcacagcctgcatgttggggtgttc

SEQ ID NO: 1604 - DNA, 39 bp, synthetic construct
  source 1..39: mol_type = other DNA
tgccagtcctatgacgacatcttgaatgtttgggtcctt

SEQ ID NO: 1605 - DNA, 39 bp, synthetic construct
  source 1..39: mol_type = other DNA
tgcaatacatgggataagagtttgacttctgaactcttc

SEQ ID NO: 1606 - DNA, 39 bp, synthetic construct
  source 1..39: mol_type = other DNA
tgcttaacatgggatcgcagcctgaatgtgagggtgttc

SEQ ID NO: 1607 - DNA, 39 bp, synthetic construct
  source 1..39: mol_type = other DNA
tgcctaacatgggaccacagcctgactgcttatgtcttc

SEQ ID NO: 1608 - DNA, 39 bp, synthetic construct
  source 1..39: mol_type = other DNA
tgcttaacaagggataccagtctgagtgcccctgtgttc

SEQ ID NO: 1609 - DNA, 42 bp, synthetic construct
  source 1..42: mol_type = other DNA
tgcaaaacatgggaaagtggccttaattttggccacgtcttc

SEQ ID NO: 1610 - DNA, 39 bp, synthetic construct
  source 1..39: mol_type = other DNA
tgcaaaacatgggataccagcctgagtgctgtggtcttc

SEQ ID NO: 1611 - DNA, 39 bp, synthetic construct
  source 1..39: mol_type = other DNA
tgcggagtctgggatgtcagtctgggtgctggggtgttc

SEQ ID NO: 1612 - DNA, 39 bp, synthetic construct
  source 1..39: mol_type = other DNA
tgcggagtctgggataccaccccgagtgccgttcttttc

SEQ ID NO: 1613 - DNA, 39 bp, synthetic construct
  source 1..39: mol_type = other DNA
tgcggagtctgggataccaccctgagtgccgttcttttc

SEQ ID NO: 1614 - DNA, 33 bp, synthetic construct
  source 1..33: mol_type = other DNA
tgcggagtatgggataccagcctgggggtcttc

SEQ ID NO: 1615 - DNA, 39 bp, synthetic construct
  source 1..39: mol_type = other DNA
tgcggggtatgggataccaacctgggtaaatgggttttc

SEQ ID NO: 1616 - DNA, 42 bp, synthetic construct
  source 1..42: mol_type = other DNA
tgtggagtttgggatactggcctggatgctggttgggtgttc

SEQ ID NO: 1617 - DNA, 39 bp, synthetic construct
  source 1..39: mol_type = other DNA
tgcggagtgtgggataacgtcctggaggcctatgtcttc

SEQ ID NO: 1618 - DNA, 42 bp, synthetic construct
  source 1..42: mol_type = other DNA
tgcggagtctgggatatcagcctgagtgctaattgggtgttc

SEQ ID NO: 1619 - DNA, 39 bp, synthetic construct
  source 1..39: mol_type = other DNA
tgcggagtatgggatcacagcctggggatttgggccttc

SEQ ID NO: 1620 - DNA, 39 bp, synthetic construct
  source 1..39: mol_type = other DNA
tgcggagtttgggatgatattctgactgctgaagtgttc

SEQ ID NO: 1621 - DNA, 33 bp, synthetic construct
  source 1..33: mol_type = other DNA
tgcggagttcgggataccagcctgggggtcttc

SEQ ID NO: 1622 - DNA, 39 bp, synthetic construct
  source 1..39: mol_type = other DNA
tgcggaacatacgatacgagcctgcctgcttgggtgttt

SEQ ID NO: 1623 - DNA, 39 bp, synthetic construct
  source 1..39: mol_type = other DNA
tgcggaacttacgataatcttgtatttggttatgtcttc

SEQ ID NO: 1624 - DNA, 36 bp, synthetic construct
  source 1..36: mol_type = other DNA
tgcggaacatacgatgatagactcagagaggtgttc

SEQ ID NO: 1625 - DNA, 39 bp, synthetic construct
  source 1..39: mol_type = other DNA
tgcggaacgtgggttaccagcctgagtgctggggtgttc

SEQ ID NO: 1626 - DNA, 39 bp, synthetic construct
  source 1..39: mol_type = other DNA
tgcggaacatgggttagcagcctgactactgtagtattc

SEQ ID NO: 1627 - DNA, 39 bp, synthetic construct
  source 1..39: mol_type = other DNA
tgcggaacatgggttagcagcctgaacgtctgggtgttc

SEQ ID NO: 1628 - DNA, 33 bp, synthetic construct
  source 1..33: mol_type = other DNA
tgcggaacatgggttggcaggttttgggtattc

SEQ ID NO: 1629 - DNA, 42 bp, synthetic construct
  source 1..42: mol_type = other DNA
tgcggaacatggtctggcggcccgagtggccattggttgttc

SEQ ID NO: 1630 - DNA, 42 bp, synthetic construct
  source 1..42: mol_type = other DNA
tgcggaacatggtctggcggcctgagtggccattggttgttc

SEQ ID NO: 1631 - DNA, 39 bp, synthetic construct
  source 1..39: mol_type = other DNA
tgcggaacgtggcagaccggccgggaggctgtcctattt

SEQ ID NO: 1632 - DNA, 36 bp, synthetic construct
  source 1..36: mol_type = other DNA
tgcggaacgtggcagagcaggctgaggtgggtgttc

SEQ ID NO: 1633 - DNA, 36 bp, synthetic construct
  source 1..36: mol_type = other DNA
tgcggaacgtggcagagcaggctggggtgggtgttc

SEQ ID NO: 1634 - DNA, 42 bp, synthetic construct
  source 1..42: mol_type = other DNA
tgcggaacatggcctaggagcctgagtgctgtttgggtgttc

SEQ ID NO: 1635 - DNA, 45 bp, synthetic construct
  source 1..45: mol_type = other DNA
tgcggaacatggaataactacctgagtgctggcgatgtggttttc

SEQ ID NO: 1636 - DNA, 42 bp, synthetic construct
  source 1..42: mol_type = other DNA
tgcggaacatggcttggcagccagagtccttattgggtcttc

SEQ ID NO: 1637 - DNA, 39 bp, synthetic construct
  source 1..39: mol_type = other DNA
tgcggaacatggcataccggcctgagtgcttatgtcttc

SEQ ID NO: 1638 - DNA, 45 bp, synthetic construct
  source 1..45: mol_type = other DNA
tgcggaacatggcatagtaccctgagtgctggccattgggtgttc

SEQ ID NO: 1639 - DNA, 39 bp, synthetic construct
  source 1..39: mol_type = other DNA
tgcggaacatggcatagtagcctgagtacttgggtgttc

SEQ ID NO: 1640 - DNA, 39 bp, synthetic construct
  source 1..39: mol_type = other DNA
tgcggaacatggcatagcagcctgagtgcctatgtcttc

SEQ ID NO: 1641 - DNA, 39 bp, synthetic construct
  source 1..39: mol_type = other DNA
tgcggaacatggcatagcagcctgagtgctgtggtattc

SEQ ID NO: 1642 - DNA, 39 bp, synthetic construct
  source 1..39: mol_type = other DNA
tgcggaacgtggcattccggcctgagtgggtgggttttc

SEQ ID NO: 1643 - DNA, 39 bp, synthetic construct
  source 1..39: mol_type = other DNA
tgcggaacatggcataacaccctgcgtaatgtgatattc

SEQ ID NO: 1644 - DNA, 36 bp, synthetic construct
  source 1..36: mol_type = other DNA
tgcggaacatggcatgccagcctgactgctgtgttc

SEQ ID NO: 1645 - DNA, 45 bp, synthetic construct
  source 1..45: mol_type = other DNA
tgcgggacatggggatggtatggcagccagagaggcgtcgtcttc

SEQ ID NO: 1646 - DNA, 45 bp, synthetic construct
  source 1..45: mol_type = other DNA
tgcgggacatggggatggtatggcggccagagaggcgtcgtcttc

SEQ ID NO: 1647 - DNA, 39 bp, synthetic construct
  source 1..39: mol_type = other DNA
tgcggaacctggggaaccagcctgagtgcttgggtgttc

SEQ ID NO: 1648 - DNA, 39 bp, synthetic construct
  source 1..39: mol_type = other DNA
tgcggaacctggggtagcagcctgactactggcctgttc

SEQ ID NO: 1649 - DNA, 39 bp, synthetic construct
  source 1..39: mol_type = other DNA
tgcggaacatggggtagcagcctgactgcctatgtcttc

SEQ ID NO: 1650 - DNA, 36 bp, synthetic construct
  source 1..36: mol_type = other DNA
tgcggaacatggggtagcagcctgagtgttgtgttc

SEQ ID NO: 1651 - DNA, 39 bp, synthetic construct
  source 1..39: mol_type = other DNA
tgcggaacatggggtagcagcctgagtggtggggtgttc

SEQ ID NO: 1652 - DNA, 42 bp, synthetic construct
  source 1..42: mol_type = other DNA
tgcggaacatggggtagcagcctgagtgcttattgggtgttc

SEQ ID NO: 1653 - DNA, 42 bp, synthetic construct
  source 1..42: mol_type = other DNA
tgcggaacatggggtagcagcctgagtgcttatgtggtgttc

SEQ ID NO: 1654 - DNA, 39 bp, synthetic construct
  source 1..39: mol_type = other DNA
tgcggaacatggggtagcagcctgagtgcttatgtcttc

SEQ ID NO: 1655 - DNA, 39 bp, synthetic construct
  source 1..39: mol_type = other DNA
tgcggaacgtggggtagtagcctgagtgctgtggtgttc

SEQ ID NO: 1656 - DNA, 42 bp, synthetic construct
  source 1..42: mol_type = other DNA
tgcggaacatggggtagcagcctgagtgctccttatgtcttc

SEQ ID NO: 1657 - DNA, 39 bp, synthetic construct
  source 1..39: mol_type = other DNA
tgcggaacatggggtagcagcctgagtgccccggtgttc

SEQ ID NO: 1658 - DNA, 39 bp, synthetic construct
  source 1..39: mol_type = other DNA
tgcggaacatggggtagcagcctgagtgctggggtgttc

SEQ ID NO: 1659 - DNA, 39 bp, synthetic construct
  source 1..39: mol_type = other DNA
tgcggaacttggggtagcagcctgagtgctggactgttc

SEQ ID NO: 1660 - DNA, 42 bp, synthetic construct
  source 1..42: mol_type = other DNA
tgcggaacatggggtagcagcctgagtgctggggcactcttc

SEQ ID NO: 1661 - DNA, 39 bp, synthetic construct
  source 1..39: mol_type = other DNA
tgcggaacatggggcagtagcctgcgtgcttgggtgttc

SEQ ID NO: 1662 - DNA, 39 bp, synthetic construct
  source 1..39: mol_type = other DNA
tgcggaacctggtttactagtctggctagtggggttttc

SEQ ID NO: 1663 - DNA, 39 bp, synthetic construct
  source 1..39: mol_type = other DNA
tgcggaacttgggagaccagtctgagtgtcgtggtcatc

SEQ ID NO: 1664 - DNA, 36 bp, synthetic construct
  source 1..36: mol_type = other DNA
tgcggaacatgggagaccagcctgagtggtgtcttc

SEQ ID NO: 1665 - DNA, 39 bp, synthetic construct
  source 1..39: mol_type = other DNA
tgcggaacatgggaaaccagcctgagtgattgggtattc

SEQ ID NO: 1666 - DNA, 39 bp, synthetic construct
  source 1..39: mol_type = other DNA
tgcggaacatgggagaccagcctgagtgctggggtattc

SEQ ID NO: 1667 - DNA, 39 bp, synthetic construct
  source 1..39: mol_type = other DNA
tgcggaacatgggaaaccagccttaattatgtggccttc

SEQ ID NO: 1668 - DNA, 39 bp, synthetic construct
  source 1..39: mol_type = other DNA
tgcggaacatgggagaccagcctgaatacttggttgctc

SEQ ID NO: 1669 - DNA, 42 bp, synthetic construct
  source 1..42: mol_type = other DNA
tgcggaacatgggagaccagcgagagtggtaattacatcttc

SEQ ID NO: 1670 - DNA, 39 bp, synthetic construct
  source 1..39: mol_type = other DNA
tgcggaacatgggaaaccagactgggtacttgggtgatc

SEQ ID NO: 1671 - DNA, 36 bp, synthetic construct
  source 1..36: mol_type = other DNA
tgcggaacatgggagacccagttatattgggtgttc

SEQ ID NO: 1672 - DNA, 42 bp, synthetic construct
  source 1..42: mol_type = other DNA
tgcggaacatgggagactggcctaagtgctggagaggtgttc

SEQ ID NO: 1673 - DNA, 39 bp, synthetic construct
  source 1..39: mol_type = other DNA
tgcggaacttgggaaagcaccctgagtgttttcctattc

SEQ ID NO: 1674 - DNA, 39 bp, synthetic construct
  source 1..39: mol_type = other DNA
tgcgggacatgggaaagtagcctgactgttgtggtcttc

SEQ ID NO: 1675 - DNA, 39 bp, synthetic construct
  source 1..39: mol_type = other DNA
tgcggaacatgggaaagtagcctgactggagtggtattc

SEQ ID NO: 1676 - DNA, 39 bp, synthetic construct
  source 1..39: mol_type = other DNA
tgcggaacatgggaaagcagcctgactggttttgtcttc

SEQ ID NO: 1677 - DNA, 39 bp, synthetic construct
  source 1..39: mol_type = other DNA
tgtggaacatgggagagcagcctgagtgttggggtgttc

SEQ ID NO: 1678 - DNA, 39 bp, synthetic construct
  source 1..39: mol_type = other DNA
tgcggaacctgggaaagtagcctcagtgaatgggtgttc

SEQ ID NO: 1679 - DNA, 36 bp, synthetic construct
  source 1..36: mol_type = other DNA
tgcggaacatgggagagcagcctgagtgctgtattc

SEQ ID NO: 1680 - DNA, 42 bp, synthetic construct
  source 1..42: mol_type = other DNA
tgcggaacatgggagagcagcctgagtgctggttatatcttc

SEQ ID NO: 1681 - DNA, 39 bp, synthetic construct
  source 1..39: mol_type = other DNA
tgcggaacatgggagagcagcctgagtgctggagtgttc

SEQ ID NO: 1682 - DNA, 42 bp, synthetic construct
  source 1..42: mol_type = other DNA
tgcggaacatgggaaagcagcctgagcgctggcccggtgttc

SEQ ID NO: 1683 - DNA, 45 bp, synthetic construct
  source 1..45: mol_type = other DNA
tgcggaacatgggaaagcagcctgagtgctggaggccaggtgttc

SEQ ID NO: 1684 - DNA, 48 bp, synthetic construct
  source 1..48: mol_type = other DNA
tgcggaacatgggagagcagcctgagtgccttcggcggttatgtcttc

SEQ ID NO: 1685 - DNA, 39 bp, synthetic construct
  source 1..39: mol_type = other DNA
tgcggaacatgggaaagcagcctgagggtttgggtgttc

SEQ ID NO: 1686 - DNA, 45 bp, synthetic construct
  source 1..45: mol_type = other DNA
tgcggaacatgggaaagcagcctctttactgggccttgggtgttc

SEQ ID NO: 1687 - DNA, 39 bp, synthetic construct
  source 1..39: mol_type = other DNA
tgcggaacatgggagagcctgagtgccacctatgtcttc

SEQ ID NO: 1688 - DNA, 39 bp, synthetic construct
  source 1..39: mol_type = other DNA
tgcggaacatgggagagcggcctgagtgctggtgtcttc

SEQ ID NO: 1689 - DNA, 33 bp, synthetic construct
  source 1..33: mol_type = other DNA
tgcggaacatgggaaagcgacttttgggtgttt

SEQ ID NO: 1690 - DNA, 39 bp, synthetic construct
  source 1..39: mol_type = other DNA
tgcggtacatgggaaaacagactgagtgctgtggtcttc

SEQ ID NO: 1691 - DNA, 39 bp, synthetic construct
  source 1..39: mol_type = other DNA
tgcggaacatgggaaaacagactgagtgccggggtattc

SEQ ID NO: 1692 - DNA, 42 bp, synthetic construct
  source 1..42: mol_type = other DNA
tgcggaacatgggaaatcagcctgactacttctgtggtattc

SEQ ID NO: 1693 - DNA, 42 bp, synthetic construct
  source 1..42: mol_type = other DNA
tgcggaacatgggaaatcagcctgagtacttctgtggtattc

SEQ ID NO: 1694 - DNA, 36 bp, synthetic construct
  source 1..36: mol_type = other DNA
tgcggaacatgggaaggcagcctcagtgttgttttc

SEQ ID NO: 1695 - DNA, 33 bp, synthetic construct
  source 1..33: mol_type = other DNA
tgcggaacatgggaaggcagcctgagggtgttc

SEQ ID NO: 1696 - DNA, 36 bp, synthetic construct
  source 1..36: mol_type = other DNA
tgcggaacatgggagggcagcctgaggcacgtgttc

SEQ ID NO: 1697 - DNA, 42 bp, synthetic construct
  source 1..42: mol_type = other DNA
tgcggaacatgggattacagccctgtacgtgctggggtgttc

SEQ ID NO: 1698 - DNA, 39 bp, synthetic construct
  source 1..39: mol_type = other DNA
tgcggaacgtgggattacagcctgagtgtttatctcttc

SEQ ID NO: 1699 - DNA, 42 bp, synthetic construct
  source 1..42: mol_type = other DNA
tgcggaacatgggattacagcctgagttctggcgtggtattc

SEQ ID NO: 1700 - DNA, 39 bp, synthetic construct
  source 1..39: mol_type = other DNA
tgcggaacatgggattacagcctgagtgcctgggtgttc

SEQ ID NO: 1701 - DNA, 39 bp, synthetic construct
  source 1..39: mol_type = other DNA
tgcggaacatgggattacagtctgagtgctgaggtgttc

SEQ ID NO: 1702 - DNA, 39 bp, synthetic construct
  source 1..39: mol_type = other DNA
tgcggaacatgggattacagcctgcgtcgtgcgatattc

SEQ ID NO: 1703 - DNA, 39 bp, synthetic construct
  source 1..39: mol_type = other DNA
tgcggaacatgggattggagcctcattcttcaattgttc

SEQ ID NO: 1704 - DNA, 39 bp, synthetic construct
  source 1..39: mol_type = other DNA
tgcggaacatgggatgtcaccttgcatactggggtgttc

SEQ ID NO: 1705 - DNA, 39 bp, synthetic construct
  source 1..39: mol_type = other DNA
tgcggaacatgggatgtcaccttgcatattggggtgttc

SEQ ID NO: 1706 - DNA, 39 bp, synthetic construct
  source 1..39: mol_type = other DNA
tgcggaacatgggatgtcaccttgcatgctggggtgttc

SEQ ID NO: 1707 - DNA, 42 bp, synthetic construct
  source 1..42: mol_type = other DNA
tgcggaacatgggatgtcagtttgtatagtggcggggtcttc

SEQ ID NO: 1708 - DNA, 39 bp, synthetic construct
  source 1..39: mol_type = other DNA
tgtggaacatgggatgtcagcctgacttctttcgtcttc

SEQ ID NO: 1709 - DNA, 39 bp, synthetic construct
  source 1..39: mol_type = other DNA
tgcggaacatgggatgtcagcctgagtgttggggtgctc

SEQ ID NO: 1710 - DNA, 45 bp, synthetic construct
  source 1..45: mol_type = other DNA
tgcggaacgtgggatgtcagcctgagtgctggcgatgtagttttc

SEQ ID NO: 1711 - DNA, 39 bp, synthetic construct
  source 1..39: mol_type = other DNA
tgcggaacatgggatgtcagcctgaatgtcgtggttttc

SEQ ID NO: 1712 - DNA, 39 bp, synthetic construct
  source 1..39: mol_type = other DNA
tgcggaacatgggatgtcagcctgaatactcaggtgttc

SEQ ID NO: 1713 - DNA, 36 bp, synthetic construct
  source 1..36: mol_type = other DNA
tgcggcacatgggatgtgagcctgggtgcgctgttc

SEQ ID NO: 1714 - DNA, 39 bp, synthetic construct
  source 1..39: mol_type = other DNA
tgcggaacgtgggacgttaatctgaaaactgtcgttttc

SEQ ID NO: 1715 - DNA, 39 bp, synthetic construct
  source 1..39: mol_type = other DNA
tgcggaacatgggatgtcatcctgagtgctgaggtattc

SEQ ID NO: 1716 - DNA, 39 bp, synthetic construct
  source 1..39: mol_type = other DNA
tgcggaacatgggataccaccgtgagtgctgtggttttc

SEQ ID NO: 1717 - DNA, 39 bp, synthetic construct
  source 1..39: mol_type = other DNA
tgcggaacatgggataccaccctgactgcctgggtgttc

SEQ ID NO: 1718 - DNA, 39 bp, synthetic construct
  source 1..39: mol_type = other DNA
tgcggaacatgggacaccaccttgagtgttttcctattc

SEQ ID NO: 1719 - DNA, 39 bp, synthetic construct
  source 1..39: mol_type = other DNA
tgcgggacttgggataccagtgtgagtgctggggtgttc

SEQ ID NO: 1720 - DNA, 39 bp, synthetic construct
  source 1..39: mol_type = other DNA
tgcggaacatgggataccagtgtgatttcttgggttttc

SEQ ID NO: 1721 - DNA, 45 bp, synthetic construct
  source 1..45: mol_type = other DNA
tgcggaacatgggataccagtcggagttctctctatgtggtcttc

SEQ ID NO: 1722 - DNA, 39 bp, synthetic construct
  source 1..39: mol_type = other DNA
tgcggaacatgggataccagccggagtgcttgggtattc

SEQ ID NO: 1723 - DNA, 42 bp, synthetic construct
  source 1..42: mol_type = other DNA
tgcggaacatgggataccagccggaatcctggaggaattttc

SEQ ID NO: 1724 - DNA, 36 bp, synthetic construct
  source 1..36: mol_type = other DNA
tgcggaacatgggacaccagtcggggtcatgttttc

SEQ ID NO: 1725 - DNA, 45 bp, synthetic construct
  source 1..45: mol_type = other DNA
tgcggaacatgggataccagcccgagtactggccaggtgcttttc

SEQ ID NO: 1726 - DNA, 39 bp, synthetic construct
  source 1..39: mol_type = other DNA
tgcggaacatgggataccagcccgagtgcctgggtgttc

SEQ ID NO: 1727 - DNA, 36 bp, synthetic construct
  source 1..36: mol_type = other DNA
tgcggaacatgggatactagcctgacctgggtgttc

SEQ ID NO: 1728 - DNA, 42 bp, synthetic construct
  source 1..42: mol_type = other DNA
tgcggaacatgggataccagcctgacgtggttcgcagtgttc

SEQ ID NO: 1729 - DNA, 39 bp, synthetic construct
  source 1..39: mol_type = other DNA
tgcggaacatgggataccagcctgactgttgtggtattc

SEQ ID NO: 1730 - DNA, 42 bp, synthetic construct
  source 1..42: mol_type = other DNA
tgcggaacatgggataccagcctgactacttcttgggtgttc

SEQ ID NO: 1731 - DNA, 48 bp, synthetic construct
  source 1..48: mol_type = other DNA
tgcggaacatgggataccagcctgaccactggtcctttttgggtgttc

SEQ ID NO: 1732 - DNA, 42 bp, synthetic construct
  source 1..42: mol_type = other DNA
tgcggaacatgggataccagcctgactcctttttatgtcttc

SEQ ID NO: 1733 - DNA, 39 bp, synthetic construct
  source 1..39: mol_type = other DNA
tgcggaacatgggataccagcctgactgcttatgtcttc

SEQ ID NO: 1734 - DNA, 39 bp, synthetic construct
  source 1..39: mol_type = other DNA
tgcggaacatgggataccagcctgactgcttgggtgttc

SEQ ID NO: 1735 - DNA, 42 bp, synthetic construct
  source 1..42: mol_type = other DNA
tgcggaacatgggataccagcctgactgcgtggggggtgttc

SEQ ID NO: 1736 - DNA, 39 bp, synthetic construct
  source 1..39: mol_type = other DNA
tgcggcacatgggataccagcctgactgcggtggttctc

SEQ ID NO: 1737 - DNA, 39 bp, synthetic construct
  source 1..39: mol_type = other DNA
tgcggaacctgggataccagcctgactgctcgggttttc

SEQ ID NO: 1738 - DNA, 39 bp, synthetic construct
  source 1..39: mol_type = other DNA
tgcggaacatgggataccagcctgactgcgattgtcttc

SEQ ID NO: 1739 - DNA, 39 bp, synthetic construct
  source 1..39: mol_type = other DNA
tgcggaacatgggataccagcctgactgctggtgtcttc

SEQ ID NO: 1740 - DNA, 39 bp, synthetic construct
  source 1..39: mol_type = other DNA
tgcggaacatgggataccagcctgagtgtttatgtcttc

SEQ ID NO: 1741 - DNA, 36 bp, synthetic construct
  source 1..36: mol_type = other DNA
tgcggaacatgggataccagcctgagtgtggtgttc

SEQ ID NO: 1742 - DNA, 39 bp, synthetic construct
  source 1..39: mol_type = other DNA
tgcgggacatgggataccagcctgagtgttggggaattc

SEQ ID NO: 1743 - DNA, 39 bp, synthetic construct
  source 1..39: mol_type = other DNA
tgcggaacatgggataccagcctgagtacttgggtgttc

SEQ ID NO: 1744 - DNA, 39 bp, synthetic construct
  source 1..39: mol_type = other DNA
tgcggaacatgggataccagcctgagtactgtggtattc

SEQ ID NO: 1745 - DNA, 45 bp, synthetic construct
  source 1..45: mol_type = other DNA
tgcggaacatgggataccagcctgagtactggccaggtgcttttc

SEQ ID NO: 1746 - DNA, 48 bp, synthetic construct
  source 1..48: mol_type = other DNA
tgcggcacatgggataccagcctgagcactggtcctctttgggtgttc

SEQ ID NO: 1747 - DNA, 39 bp, synthetic construct
  source 1..39: mol_type = other DNA
tgcggaacttgggataccagcctgagttcttatgtcttc

SEQ ID NO: 1748 - DNA, 39 bp, synthetic construct
  source 1..39: mol_type = other DNA
tgcggaacatgggataccagcctgagttctgtggtcttc

SEQ ID NO: 1749 - DNA, 42 bp, synthetic construct
  source 1..42: mol_type = other DNA
tgcggaacatgggataccagcctgagttctagatacatattc

SEQ ID NO: 1750 - DNA, 42 bp, synthetic construct
  source 1..42: mol_type = other DNA
tgcggaacatgggataccagcctgagttctagattcatattc

SEQ ID NO: 1751 - DNA, 42 bp, synthetic construct
  source 1..42: mol_type = other DNA
tgcggaacatgggataccagcctgagttctgggtgggtgttc

SEQ ID NO: 1752 - DNA, 39 bp, synthetic construct
  source 1..39: mol_type = other DNA
tgcggaacatgggataccagcctgagtcggtatgtgttc

SEQ ID NO: 1753 - DNA, 39 bp, synthetic construct
  source 1..39: mol_type = other DNA
tgcggaacttgggataccagtctgagtcaatggctgttc

SEQ ID NO: 1754 - DNA, 45 bp, synthetic construct
  source 1..45: mol_type = other DNA
tgcggaacatgggataccagcctgagtcctggcctttgggtgttc

SEQ ID NO: 1755 - DNA, 39 bp, synthetic construct
  source 1..39: mol_type = other DNA
tgcggaacatgggataccagcctgagtaattatgtcttc

SEQ ID NO: 1756 - DNA, 39 bp, synthetic construct
  source 1..39: mol_type = other DNA
tgcggaacatgggataccagcctaagtatttgggtgttc

SEQ ID NO: 1757 - DNA, 48 bp, synthetic construct
  source 1..48: mol_type = other DNA
tgcggcacatgggataccagcctgagcattggtcctttttgggtgttc

SEQ ID NO: 1758 - DNA, 39 bp, synthetic construct
  source 1..39: mol_type = other DNA
tgcggaacatgggataccagcctgagtggttgggtgttc

SEQ ID NO: 1759 - DNA, 39 bp, synthetic construct
  source 1..39: mol_type = other DNA
tgcggaacatgggataccagcctgagtggtacagtgttc

SEQ ID NO: 1760 - DNA, 42 bp, synthetic construct
  source 1..42: mol_type = other DNA
tgcggaacatgggatactagtctgagtggtggccaggtgttc

SEQ ID NO: 1761 - DNA, 39 bp, synthetic construct
  source 1..39: mol_type = other DNA
tgcggaacatgggataccagcctgagtggtgggatattc

SEQ ID NO: 1762 - DNA, 45 bp, synthetic construct
  source 1..45: mol_type = other DNA
tgcggaacatgggataccagcctgagtggtgaggatgtggtaatc

SEQ ID NO: 1763 - DNA, 42 bp, synthetic construct
  source 1..42: mol_type = other DNA
tgcggaacatgggataccagcctgagtttcctttatgctttc

SEQ ID NO: 1764 - DNA, 39 bp, synthetic construct
  source 1..39: mol_type = other DNA
tgcggaacatgggataccagcctgagtgaggtcgtattc

SEQ ID NO: 1765 - DNA, 36 bp, synthetic construct
  source 1..36: mol_type = other DNA
tgcggaacatgggataccagcctgagtgaagtgttc

SEQ ID NO: 1766 - DNA, 42 bp, synthetic construct
  source 1..42: mol_type = other DNA
tgcggaacatgggatactagcctgagtgaaaattgggtgttc

SEQ ID NO: 1767 - DNA, 39 bp, synthetic construct
  source 1..39: mol_type = other DNA
tgcggaacatgggataccagcctgagtgcctacatattc

SEQ ID NO: 1768 - DNA, 39 bp, synthetic construct
  source 1..39: mol_type = other DNA
tgcggaacatgggataccagcctgagtgctgtggtactc

SEQ ID NO: 1769 - DNA, 36 bp, synthetic construct
  source 1..36: mol_type = other DNA
tgcggaacatgggataccagcctgagtgctgttttc

SEQ ID NO: 1770 - DNA, 39 bp, synthetic construct
  source 1..39: mol_type = other DNA
tgcggaacatgggataccagcctgagtgcccgggtgttc

SEQ ID NO: 1771 - DNA, 42 bp, synthetic construct
  source 1..42: mol_type = other DNA
tgcggcacatgggataccagcctgagtgcccgccaggtattc

SEQ ID NO: 1772 - DNA, 39 bp, synthetic construct
  source 1..39: mol_type = other DNA
tgcggaacatgggataccagcctgagtgctttggttttc

SEQ ID NO: 1773 - DNA, 39 bp, synthetic construct
  source 1..39: mol_type = other DNA
tgcggaacatgggataccagcctgagtgctaaggtgttc

SEQ ID NO: 1774 - DNA, 39 bp, synthetic construct
  source 1..39: mol_type = other DNA
tgcggaacatgggataccagcctgagtgcgaaaatcttc

SEQ ID NO: 1775 - DNA, 42 bp, synthetic construct
  source 1..42: mol_type = other DNA
tgcggaacatgggataccagcctgagtgccaaggcggtattc

SEQ ID NO: 1776 - DNA, 42 bp, synthetic construct
  source 1..42: mol_type = other DNA
tgcggaacatgggataccagcctgagtgcccatgctgtgttc

SEQ ID NO: 1777 - DNA, 42 bp, synthetic construct
  source 1..42: mol_type = other DNA
tgcggaacatgggataccagcctgagtgctggctatgtcttc

SEQ ID NO: 1778 - DNA, 45 bp, synthetic construct
  source 1..45: mol_type = other DNA
tgcggaacatgggacaccagtctgagtgctggccgctgggtgttc

SEQ ID NO: 1779 - DNA, 39 bp, synthetic construct
  source 1..39: mol_type = other DNA
tgcggaacatgggataccagcctgagtgctgggatattc

SEQ ID NO: 1780 - DNA, 48 bp, synthetic construct
  source 1..48: mol_type = other DNA
tgcggaacatgggataccagcctgagtgctggtgggttccgggtcttc

SEQ ID NO: 1781 - DNA, 39 bp, synthetic construct
  source 1..39: mol_type = other DNA
tgcggaacatgggataccagcctgagtgctggggcattc

SEQ ID NO: 1782 - DNA, 42 bp, synthetic construct
  source 1..42: mol_type = other DNA
tgcggaacatgggataccagtctgagtgctgattggtttttc

SEQ ID NO: 1783 - DNA, 45 bp, synthetic construct
  source 1..45: mol_type = other DNA
tgcggaacatgggataccagcctgagtgctgatgaatatgtcttc

SEQ ID NO: 1784 - DNA, 42 bp, synthetic construct
  source 1..42: mol_type = other DNA
tgcggcacatgggataccagcctgagtgcggcttgggtgttc

SEQ ID NO: 1785 - DNA, 39 bp, synthetic construct
  source 1..39: mol_type = other DNA
tgcggaacatgggataccagcctgagtgctgcgctattc

SEQ ID NO: 1786 - DNA, 42 bp, synthetic construct
  source 1..42: mol_type = other DNA
tgcggaacatgggataccagcctgagtgctgcgggggttttc

SEQ ID NO: 1787 - DNA, 39 bp, synthetic construct
  source 1..39: mol_type = other DNA
tgcggaacatgggataccagcctgagagttgtggttttc

SEQ ID NO: 1788 - DNA, 39 bp, synthetic construct
  source 1..39: mol_type = other DNA
tgcggaacatgggataccagcctgagaacctgggtattc

SEQ ID NO: 1789 - DNA, 39 bp, synthetic construct
  source 1..39: mol_type = other DNA
tgcggaacgtgggataccagcctgaggggtgcagtgttc

SEQ ID NO: 1790 - DNA, 39 bp, synthetic construct
  source 1..39: mol_type = other DNA
tgcggaacatgggataccagcctgcgtgctgtggtattc

SEQ ID NO: 1791 - DNA, 42 bp, synthetic construct
  source 1..42: mol_type = other DNA
tgcggaacatgggatacaagcctgaatgtagtttatgtcttc

SEQ ID NO: 1792 - DNA, 39 bp, synthetic construct
  source 1..39: mol_type = other DNA
tgcggaacatgggataccagcctcaacacctacctgttc

SEQ ID NO: 1793 - DNA, 42 bp, synthetic construct
  source 1..42: mol_type = other DNA
tgcggaacatgggatactagcctgaacttcgcttggctgttc

SEQ ID NO: 1794 - DNA, 39 bp, synthetic construct
  source 1..39: mol_type = other DNA
tgcggcacatgggataccagccttcttgtgtggcttttc

SEQ ID NO: 1795 - DNA, 39 bp, synthetic construct
  source 1..39: mol_type = other DNA
tgcggaacatgggataccagtctgaagacgtgggtgttc

SEQ ID NO: 1796 - DNA, 39 bp, synthetic construct
  source 1..39: mol_type = other DNA
tgcggaacatgggataccagtctgattgtctgggtgttc

SEQ ID NO: 1797 - DNA, 39 bp, synthetic construct
  source 1..39: mol_type = other DNA
tgcggaacatgggataccagcctaattactggggtgttc

SEQ ID NO: 1798 - DNA, 39 bp, synthetic construct
  source 1..39: mol_type = other DNA
tgcggaacatgggataccagcctgattagcgtggtattc

SEQ ID NO: 1799 - DNA, 39 bp, synthetic construct
  source 1..39: mol_type = other DNA
tgcggaacatgggataccagcctgattgcttatgtcttc

SEQ ID NO: 1800 - DNA, 39 bp, synthetic construct
  source 1..39: mol_type = other DNA
tgcggaacatgggataccagcctgcacactgagttgttc

SEQ ID NO: 1801 - DNA, 39 bp, synthetic construct
  source 1..39: mol_type = other DNA
tgcggaacttgggataccagcctgggttcttatgtcttc

SEQ ID NO: 1802 - DNA, 42 bp, synthetic construct
  source 1..42: mol_type = other DNA
tgcggaacatgggataccagcctgggttctctttgggtgttc

SEQ ID NO: 1803 - DNA, 39 bp, synthetic construct
  source 1..39: mol_type = other DNA
tgcggtacatgggataccagcctgggttctggggtattc

SEQ ID NO: 1804 - DNA, 42 bp, synthetic construct
  source 1..42: mol_type = other DNA
tgcggaacttgggataccagtctgggtggtagaggggtcttc

SEQ ID NO: 1805 - DNA, 39 bp, synthetic construct
  source 1..39: mol_type = other DNA
tgcggaacatgggataccagcctgggtgcttgggtgttc

SEQ ID NO: 1806 - DNA, 39 bp, synthetic construct
  source 1..39: mol_type = other DNA
tgcggaacatgggataccagcctgggtgccgtggtattc

SEQ ID NO: 1807 - DNA, 39 bp, synthetic construct
  source 1..39: mol_type = other DNA
tgcggaacatgggataccagcctgggtgctggggtattc

SEQ ID NO: 1808 - DNA, 39 bp, synthetic construct
  source 1..39: mol_type = other DNA
tgcggaacatgggataccagcctgggtgctggcctattc

SEQ ID NO: 1809 - DNA, 39 bp, synthetic construct
  source 1..39: mol_type = other DNA
tgcggaacatgggataccagtctggatgctgtggttttc

SEQ ID NO: 1810 - DNA, 39 bp, synthetic construct
  source 1..39: mol_type = other DNA
tgcgggacttgggataccagcctggatgctgtgctgttc

SEQ ID NO: 1811 - DNA, 36 bp, synthetic construct
  source 1..36: mol_type = other DNA
tgcggaacatgggataccagcctggcttgggtgttc

SEQ ID NO: 1812 - DNA, 39 bp, synthetic construct
  source 1..39: mol_type = other DNA
tgcggaacatgggataccagcctggcgactggactgttc

SEQ ID NO: 1813 - DNA, 39 bp, synthetic construct
  source 1..39: mol_type = other DNA
tgcgggacatgggataccagcctggcccctgtagtcttc

SEQ ID NO: 1814 - DNA, 39 bp, synthetic construct
  source 1..39: mol_type = other DNA
tgcggaacatgggacacccgcctgactattgtgatcttc

SEQ ID NO: 1815 - DNA, 39 bp, synthetic construct
  source 1..39: mol_type = other DNA
tgtggaacatgggacaccaggctgagtgtttggctgttc

SEQ ID NO: 1816 - DNA, 39 bp, synthetic construct
  source 1..39: mol_type = other DNA
tgcggaacgtgggacaccagactgagtgttggggttttc

SEQ ID NO: 1817 - DNA, 39 bp, synthetic construct
  source 1..39: mol_type = other DNA
tgcggcacatgggataccagactgagtactgtaattttc

SEQ ID NO: 1818 - DNA, 39 bp, synthetic construct
  source 1..39: mol_type = other DNA
tgcggaacatgggatacccgcctgagttctgtggtcttc

SEQ ID NO: 1819 - DNA, 39 bp, synthetic construct
  source 1..39: mol_type = other DNA
tgcggaacatgggatacccgcctgagtattgtggttttc

SEQ ID NO: 1820 - DNA, 42 bp, synthetic construct
  source 1..42: mol_type = other DNA
tgcggaacatgggataccagactgagtgcctatgtggtattc

SEQ ID NO: 1821 - DNA, 39 bp, synthetic construct
  source 1..39: mol_type = other DNA
tgcggaacctgggacacccgcctgagtgcgtgggtgttc

SEQ ID NO: 1822 - DNA, 39 bp, synthetic construct
  source 1..39: mol_type = other DNA
tgcggaacatgggataccagactgagtgctgtggtgttc

SEQ ID NO: 1823 - DNA, 39 bp, synthetic construct
  source 1..39: mol_type = other DNA
tgcggaacatgggatacccgcctgagtgctgggttgttc

SEQ ID NO: 1824 - DNA, 42 bp, synthetic construct
  source 1..42: mol_type = other DNA
tgcggaacatgggataccagactgagtgctggtggggtgttc

SEQ ID NO: 1825 - DNA, 39 bp, synthetic construct
  source 1..39: mol_type = other DNA
tgcggaacatgggataccagattgaatgtgtggctattc

SEQ ID NO: 1826 - DNA, 39 bp, synthetic construct
  source 1..39: mol_type = other DNA
tgcggaacatgggataccaaccgggaagttgtgctcctc

SEQ ID NO: 1827 - DNA, 39 bp, synthetic construct
  source 1..39: mol_type = other DNA
tgcggaacatgggataccaacctgcgtgcccatgtcttc

SEQ ID NO: 1828 - DNA, 39 bp, synthetic construct
  source 1..39: mol_type = other DNA
tgcggaacatgggatactaatctgcccgctgtagtgttc

SEQ ID NO: 1829 - DNA, 36 bp, synthetic construct
  source 1..36: mol_type = other DNA
tgcggaacatgggacaccaatttgggtggggtgttc

SEQ ID NO: 1830 - DNA, 39 bp, synthetic construct
  source 1..39: mol_type = other DNA
tgcggaacatgggataccatcgtgagtattggggtgttc

SEQ ID NO: 1831 - DNA, 39 bp, synthetic construct
  source 1..39: mol_type = other DNA
tgcggaacatgggataccatcctgagtgcggtggtgttc

SEQ ID NO: 1832 - DNA, 39 bp, synthetic construct
  source 1..39: mol_type = other DNA
tgcggcacatgggataccatcctgagtgctgaggtgttc

SEQ ID NO: 1833 - DNA, 36 bp, synthetic construct
  source 1..36: mol_type = other DNA
tgcggaacatgggatacccacctgggtgtggttttc

SEQ ID NO: 1834 - DNA, 42 bp, synthetic construct
  source 1..42: mol_type = other DNA
tgcggaacatgggataccggcccgagccctcattggctgttc

SEQ ID NO: 1835 - DNA, 42 bp, synthetic construct
  source 1..42: mol_type = other DNA
tgcggaacatgggataccggcctgacttttggaggcgtgttc

SEQ ID NO: 1836 - DNA, 39 bp, synthetic construct
  source 1..39: mol_type = other DNA
tgcggaacatgggataccggcctgactgcttttgtcttc

SEQ ID NO: 1837 - DNA, 39 bp, synthetic construct
  source 1..39: mol_type = other DNA
tgcggaacatgggataccggcctgagtgtttgggtgttc

SEQ ID NO: 1838 - DNA, 39 bp, synthetic construct
  source 1..39: mol_type = other DNA
tgcggaacatgggataccggcctgagtactgggattttc

SEQ ID NO: 1839 - DNA, 39 bp, synthetic construct
  source 1..39: mol_type = other DNA
tgcggaacatgggataccggcctgagttccctgctcttc

SEQ ID NO: 1840 - DNA, 39 bp, synthetic construct
  source 1..39: mol_type = other DNA
tgcggaacgtgggacaccggcctgagtattgtggtgttc

SEQ ID NO: 1841 - DNA, 39 bp, synthetic construct
  source 1..39: mol_type = other DNA
tgcggaacgtgggacaccggcctgagttttgtggtgttc

SEQ ID NO: 1842 - DNA, 39 bp, synthetic construct
  source 1..39: mol_type = other DNA
tgcggaacatgggataccggcctgagtgcttgggtgttc

SEQ ID NO: 1843 - DNA, 42 bp, synthetic construct
  source 1..42: mol_type = other DNA
tgcggaacatgggataccggcctgagtgctggtgtggtattc

SEQ ID NO: 1844 - DNA, 39 bp, synthetic construct
  source 1..39: mol_type = other DNA
tgcggaacatgggataccggtctgaggggttggattttc

SEQ ID NO: 1845 - DNA, 39 bp, synthetic construct
  source 1..39: mol_type = other DNA
tgcggaacatgggataccgagctaagtgcgggggtcttc

SEQ ID NO: 1846 - DNA, 39 bp, synthetic construct
  source 1..39: mol_type = other DNA
tgcggaacgtgggataccgccctgactgctggggtgttc

SEQ ID NO: 1847 - DNA, 39 bp, synthetic construct
  source 1..39: mol_type = other DNA
tgcggaacatgggatactgccctgagtcttgtggtcttc

SEQ ID NO: 1848 - DNA, 39 bp, synthetic construct
  source 1..39: mol_type = other DNA
tgcggaacatgggataccgccctgagtgcctggctgttc

SEQ ID NO: 1849 - DNA, 39 bp, synthetic construct
  source 1..39: mol_type = other DNA
tgcggcacatgggataccgccctgagtgctggggtgttc

SEQ ID NO: 1850 - DNA, 39 bp, synthetic construct
  source 1..39: mol_type = other DNA
tgcggaacatgggataccgccctgcgtggcgtgctgttc

SEQ ID NO: 1851 - DNA, 39 bp, synthetic construct
  source 1..39: mol_type = other DNA
tgcggaacatgggataccgccctgaaagaatggctgttc

SEQ ID NO: 1852 - DNA, 45 bp, synthetic construct
  source 1..45: mol_type = other DNA
tgcggaacatgggataggaccctgactgctggcgatgtgctcttc

SEQ ID NO: 1853 - DNA, 36 bp, synthetic construct
  source 1..36: mol_type = other DNA
tgcggaacatgggatagaagcgtgacttatgtcttc

SEQ ID NO: 1854 - DNA, 39 bp, synthetic construct
  source 1..39: mol_type = other DNA
tgcggaacatgggatcgcagccgaaatgaatgggtgttc

SEQ ID NO: 1855 - DNA, 39 bp, synthetic construct
  source 1..39: mol_type = other DNA
tgcggaacatgggatcgcagtctgactgtttgggtcttc

SEQ ID NO: 1856 - DNA, 42 bp, synthetic construct
  source 1..42: mol_type = other DNA
tgcggaacatgggatcgcagcctgactcctgggtggttgttc

SEQ ID NO: 1857 - DNA, 39 bp, synthetic construct
  source 1..39: mol_type = other DNA
tgcggaacatgggatagaagcctgactgcttgggtgttc

SEQ ID NO: 1858 - DNA, 39 bp, synthetic construct
  source 1..39: mol_type = other DNA
tgcggaacatgggaccgcagcctgagtgttgtggtattc

SEQ ID NO: 1859 - DNA, 36 bp, synthetic construct
  source 1..36: mol_type = other DNA
tgcggcacatgggatcgcagcctgagtgtagtcttc

SEQ ID NO: 1860 - DNA, 39 bp, synthetic construct
  source 1..39: mol_type = other DNA
tgcggaacatgggataggagcctgagtgttcaattgttc

SEQ ID NO: 1861 - DNA, 42 bp, synthetic construct
  source 1..42: mol_type = other DNA
tgcggaacatgggatcgcagcctcagtgttctttgggtgttc

SEQ ID NO: 1862 - DNA, 39 bp, synthetic construct
  source 1..39: mol_type = other DNA
tgcggaacatgggatcgcagcctgagtgttggattattc

SEQ ID NO: 1863 - DNA, 39 bp, synthetic construct
  source 1..39: mol_type = other DNA
tgcggaacatgggatcgcagcctgagtacttgggtgttc

SEQ ID NO: 1864 - DNA, 42 bp, synthetic construct
  source 1..42: mol_type = other DNA
tgcggaacatgggatagaagcctgagtactcattgggtgctc

SEQ ID NO: 1865 - DNA, 42 bp, synthetic construct
  source 1..42: mol_type = other DNA
tgcggaacatgggatagaagcctgagtactcattgggtgttc

SEQ ID NO: 1866 - DNA, 39 bp, synthetic construct
  source 1..39: mol_type = other DNA
tgcggaacctgggatcgaagcctgagttctgcggtgttc

SEQ ID NO: 1867 - DNA, 42 bp, synthetic construct
  source 1..42: mol_type = other DNA
tgcggaacatgggacagaagcctgagtccctcttatgtcttc

SEQ ID NO: 1868 - DNA, 39 bp, synthetic construct
  source 1..39: mol_type = other DNA
tgcggaacatgggataggagcctgagtggtgaggtgttc

SEQ ID NO: 1869 - DNA, 39 bp, synthetic construct
  source 1..39: mol_type = other DNA
tgcggaacatgggataggagcctgagtggtgcggtgttc

SEQ ID NO: 1870 - DNA, 39 bp, synthetic construct
  source 1..39: mol_type = other DNA
tgcggaacatgggatcgcagcctgagtgctgtggcattc

SEQ ID NO: 1871 - DNA, 42 bp, synthetic construct
  source 1..42: mol_type = other DNA
tgcggaacatgggataggagcctgagtgccgggggggaattc

SEQ ID NO: 1872 - DNA, 42 bp, synthetic construct
  source 1..42: mol_type = other DNA
tgcggaacatgggatcgcagcctgagtgctttttgggtgttc

SEQ ID NO: 1873 - DNA, 39 bp, synthetic construct
  source 1..39: mol_type = other DNA
tgcggaacatgggataggagcctgagtgctgcggtgttc

SEQ ID NO: 1874 - DNA, 39 bp, synthetic construct
  source 1..39: mol_type = other DNA
tgcggaacatgggataggagcctgagtgctgcactcttc

SEQ ID NO: 1875 - DNA, 33 bp, synthetic construct
  source 1..33: mol_type = other DNA
tgcggaacatgggatcgcagcctgagagtgttc

SEQ ID NO: 1876 - DNA, 36 bp, synthetic construct
  source 1..36: mol_type = other DNA
tgcggtacatgggacagaagccttaattgggtgttc

SEQ ID NO: 1877 - DNA, 39 bp, synthetic construct
  source 1..39: mol_type = other DNA
tgcggaacatgggatcgcagcctgaatgtttatgtcttc

SEQ ID NO: 1878 - DNA, 39 bp, synthetic construct
  source 1..39: mol_type = other DNA
tgcggaacatgggataggagcctgaatgttggggtgttc

SEQ ID NO: 1879 - DNA, 36 bp, synthetic construct
  source 1..36: mol_type = other DNA
tgcggaacatgggatcggagcctgcatgtggtcttc

SEQ ID NO: 1880 - DNA, 39 bp, synthetic construct
  source 1..39: mol_type = other DNA
tgtggaacatgggatcgcagcctgggtggttgggtgttc

SEQ ID NO: 1881 - DNA, 42 bp, synthetic construct
  source 1..42: mol_type = other DNA
tgcggaacatgggatcgcagcctgggtgctttttgggtgttc

SEQ ID NO: 1882 - DNA, 36 bp, synthetic construct
  source 1..36: mol_type = other DNA
tgcggaacatgggatagaagcctgttttgggtgttc

SEQ ID NO: 1883 - DNA, 39 bp, synthetic construct
  source 1..39: mol_type = other DNA
tgcggaacgtgggatcgcagcctggctgctggggtgttc

SEQ ID NO: 1884 - DNA, 39 bp, synthetic construct
  source 1..39: mol_type = other DNA
tgcggaacatgggataggaggttgagtggtgtcgtattc

SEQ ID NO: 1885 - DNA, 39 bp, synthetic construct
  source 1..39: mol_type = other DNA
tgcggaacgtgggatcgccgcctaagtgatgtggtattc

SEQ ID NO: 1886 - DNA, 39 bp, synthetic construct
  source 1..39: mol_type = other DNA
tgcggaacatgggataggaggctgagtgctgtggtattc

SEQ ID NO: 1887 - DNA, 39 bp, synthetic construct
  source 1..39: mol_type = other DNA
tgcggaacatgggatagacgcctgaatgttgcgttcttc

SEQ ID NO: 1888 - DNA, 36 bp, synthetic construct
  source 1..36: mol_type = other DNA
tgtggaacatgggataggaggctgcttgctgttttc

SEQ ID NO: 1889 - DNA, 39 bp, synthetic construct
  source 1..39: mol_type = other DNA
tgcggaacttgggataggaacctgcgcgccgtggtcttc

SEQ ID NO: 1890 - DNA, 36 bp, synthetic construct
  source 1..36: mol_type = other DNA
tgcggaacatgggataggctgagtgctggggtgttc

SEQ ID NO: 1891 - DNA, 39 bp, synthetic construct
  source 1..39: mol_type = other DNA
tgcggaacatgggatagaggcccgaatactggggtattc

SEQ ID NO: 1892 - DNA, 42 bp, synthetic construct
  source 1..42: mol_type = other DNA
tgcggaacatgggatagaggcctgaatactgtttacgtcttc

SEQ ID NO: 1893 - DNA, 42 bp, synthetic construct
  source 1..42: mol_type = other DNA
tgcggaacatgggataactatgtgagtgccccttgggtgttc

SEQ ID NO: 1894 - DNA, 45 bp, synthetic construct
  source 1..45: mol_type = other DNA
tgcggaacatgggataactacctgagtgctggcgatgtggttttc

SEQ ID NO: 1895 - DNA, 39 bp, synthetic construct
  source 1..39: mol_type = other DNA
tgcggaacatgggataactacctgagagctggggtcttc

SEQ ID NO: 1896 - DNA, 39 bp, synthetic construct
  source 1..39: mol_type = other DNA
tgcggaacatgggacaattatctgggtgccgtggttttc

SEQ ID NO: 1897 - DNA, 39 bp, synthetic construct
  source 1..39: mol_type = other DNA
tgcggaacatgggataactacctgggtgcgggggtgttc

SEQ ID NO: 1898 - DNA, 42 bp, synthetic construct
  source 1..42: mol_type = other DNA
tgcggaacatgggataacaccgtgagtgccccttgggttttc

SEQ ID NO: 1899 - DNA, 39 bp, synthetic construct
  source 1..39: mol_type = other DNA
tgcggaacatgggataacaccctgagtctttgggtgttc

SEQ ID NO: 1900 - DNA, 39 bp, synthetic construct
  source 1..39: mol_type = other DNA
tgcggaacatgggataacaccctgagtgctggggtcttc

SEQ ID NO: 1901 - DNA, 39 bp, synthetic construct
  source 1..39: mol_type = other DNA
tgcggaacatgggacaacactctgcttactgtgttattc

SEQ ID NO: 1902 - DNA, 39 bp, synthetic construct
  source 1..39: mol_type = other DNA
tgcggaacatgggataacagactgagtagtgtgattttc

SEQ ID NO: 1903 - DNA, 39 bp, synthetic construct
  source 1..39: mol_type = other DNA
tgcggaacatgggataacaggttgagtgctgtggtcttc

SEQ ID NO: 1904 - DNA, 42 bp, synthetic construct
  source 1..42: mol_type = other DNA
tgcggaacatgggataacaggctgagtgctggtgggatattc

SEQ ID NO: 1905 - DNA, 39 bp, synthetic construct
  source 1..39: mol_type = other DNA
tgcggaacatgggataacagactgagtgctgaggtgttc

SEQ ID NO: 1906 - DNA, 39 bp, synthetic construct
  source 1..39: mol_type = other DNA
tgtggaacatgggataacagactgcgtgttggggttctc

SEQ ID NO: 1907 - DNA, 39 bp, synthetic construct
  source 1..39: mol_type = other DNA
tgcggaacatgggataatcgcctgcttgagaatgtcttc

SEQ ID NO: 1908 - DNA, 36 bp, synthetic construct
  source 1..36: mol_type = other DNA
tgcggaacatgggataacaacctgcgtgctgtcttc

SEQ ID NO: 1909 - DNA, 39 bp, synthetic construct
  source 1..39: mol_type = other DNA
tgcggaacttgggataataacctgcgtgctggagtgttc

SEQ ID NO: 1910 - DNA, 42 bp, synthetic construct
  source 1..42: mol_type = other DNA
tgcggaacatgggacaacaatttgggcggtggccgggtgttc

SEQ ID NO: 1911 - DNA, 39 bp, synthetic construct
  source 1..39: mol_type = other DNA
tgcggaacatgggataacaacctgggtgctggcgtcctc

SEQ ID NO: 1912 - DNA, 39 bp, synthetic construct
  source 1..39: mol_type = other DNA
tgcggaacatgggataacaacctgggtgctggcgtcttc

SEQ ID NO: 1913 - DNA, 39 bp, synthetic construct
  source 1..39: mol_type = other DNA
tgcggaacttgggataacatcctgagcgctgcggtgttc

SEQ ID NO: 1914 - DNA, 39 bp, synthetic construct
  source 1..39: mol_type = other DNA
tgcggaacctgggataacatcttggatgcaggggttttc

SEQ ID NO: 1915 - DNA, 39 bp, synthetic construct
  source 1..39: mol_type = other DNA
tgcggaacatgggataacgacctgagtggttggctgttc

SEQ ID NO: 1916 - DNA, 39 bp, synthetic construct
  source 1..39: mol_type = other DNA
tgcggaacatgggataacgacctgagtgcctgggtgttc

SEQ ID NO: 1917 - DNA, 39 bp, synthetic construct
  source 1..39: mol_type = other DNA
tgcggaacatgggatctcaccctgggtggtgtggtgttc

SEQ ID NO: 1918 - DNA, 39 bp, synthetic construct
  source 1..39: mol_type = other DNA
tgcggaacatgggatctcagcctgagtgctggggtattc

SEQ ID NO: 1919 - DNA, 39 bp, synthetic construct
  source 1..39: mol_type = other DNA
tgcggaacatgggatctcagcctgaaagaatgggtgttc

SEQ ID NO: 1920 - DNA, 39 bp, synthetic construct
  source 1..39: mol_type = other DNA
tgcggaacgtgggatctcagcctggatgctgttgttttc

SEQ ID NO: 1921 - DNA, 27 bp, synthetic construct
  source 1..27: mol_type = other DNA
tgcggaacctgggacctgaaggttttc

SEQ ID NO: 1922 - DNA, 39 bp, synthetic construct
  source 1..39: mol_type = other DNA
tgcggaacatgggataagactctgagtgtttgggtgttc

SEQ ID NO: 1923 - DNA, 39 bp, synthetic construct
  source 1..39: mol_type = other DNA
tgcggaacatgggataagagcctgagtgtttgggtgttc

SEQ ID NO: 1924 - DNA, 39 bp, synthetic construct
  source 1..39: mol_type = other DNA
tgcggaacatgggataagagcctgagtggtgtggtattt

SEQ ID NO: 1925 - DNA, 39 bp, synthetic construct
  source 1..39: mol_type = other DNA
tgcggaacatgggataagagcctgagtgattgggtgttc

SEQ ID NO: 1926 - DNA, 39 bp, synthetic construct
  source 1..39: mol_type = other DNA
tgcggaacatgggataagagcctgagtgctttggttttc

SEQ ID NO: 1927 - DNA, 39 bp, synthetic construct
  source 1..39: mol_type = other DNA
tgcggaacatgggataagagcctgagtgctggcgtcttc

SEQ ID NO: 1928 - DNA, 39 bp, synthetic construct
  source 1..39: mol_type = other DNA
tgcggaacatgggataagagcctgagtgccgacgtcttc

SEQ ID NO: 1929 - DNA, 39 bp, synthetic construct
  source 1..39: mol_type = other DNA
tgcggaacatgggataaacgcctgactattgtggtcttc

SEQ ID NO: 1930 - DNA, 39 bp, synthetic construct
  source 1..39: mol_type = other DNA
tgcggaacatgggataaacgcctgagtgcctgggtgctc

SEQ ID NO: 1931 - DNA, 39 bp, synthetic construct
  source 1..39: mol_type = other DNA
tgcggaacatgggataagaacctgcgtgctgtggtcttc

SEQ ID NO: 1932 - DNA, 39 bp, synthetic construct
  source 1..39: mol_type = other DNA
tgcggaacatgggatatcaccctgagtgggtttgtcttc

SEQ ID NO: 1933 - DNA, 39 bp, synthetic construct
  source 1..39: mol_type = other DNA
tgcggaacatgggatatcaccttgcatactggagtattc

SEQ ID NO: 1934 - DNA, 36 bp, synthetic construct
  source 1..36: mol_type = other DNA
tgcggaacatgggatatcagtgtgactgtggtgttc

SEQ ID NO: 1935 - DNA, 39 bp, synthetic construct
  source 1..39: mol_type = other DNA
tgcggaacatgggatatcagtgtgaggggttatgccttc

SEQ ID NO: 1936 - DNA, 33 bp, synthetic construct
  source 1..33: mol_type = other DNA
tgcggaacatgggatatcagccgttgggttttc

SEQ ID NO: 1937 - DNA, 39 bp, synthetic construct
  source 1..39: mol_type = other DNA
tgcggaacatgggatatcagcccgagtgcttgggtgttc

SEQ ID NO: 1938 - DNA, 39 bp, synthetic construct
  source 1..39: mol_type = other DNA
tgcggaacatgggatattagcctgagtgtctgggtgttc

SEQ ID NO: 1939 - DNA, 36 bp, synthetic construct
  source 1..36: mol_type = other DNA
tgcggaacatgggatatcagcctgagtgttgtattc

SEQ ID NO: 1940 - DNA, 39 bp, synthetic construct
  source 1..39: mol_type = other DNA
tgcggaacttgggatatcagcctgagttctgtggtgttc

SEQ ID NO: 1941 - DNA, 39 bp, synthetic construct
  source 1..39: mol_type = other DNA
tgcggaacatgggatatcagcctgagtcactggttgttc

SEQ ID NO: 1942 - DNA, 39 bp, synthetic construct
  source 1..39: mol_type = other DNA
tgcggaacatgggatatcagtctgagtggttgggtgttc

SEQ ID NO: 1943 - DNA, 39 bp, synthetic construct
  source 1..39: mol_type = other DNA
tgcggaacatgggatatcagcctgagtggtcgagtgttc

SEQ ID NO: 1944 - DNA, 39 bp, synthetic construct
  source 1..39: mol_type = other DNA
tgcggaacatgggacatcagcctgagtgcttgggcgttc

SEQ ID NO: 1945 - DNA, 39 bp, synthetic construct
  source 1..39: mol_type = other DNA
tgcggaacatgggatatcagcctgagtgctgtggttttc

SEQ ID NO: 1946 - DNA, 39 bp, synthetic construct
  source 1..39: mol_type = other DNA
tgcgggacatgggacatcagcctgagtgctgtgatattc

SEQ ID NO: 1947 - DNA, 36 bp, synthetic construct
  source 1..36: mol_type = other DNA
tgcggaacatgggatatcagcctgagtgctgtgttc

SEQ ID NO: 1948 - DNA, 39 bp, synthetic construct
  source 1..39: mol_type = other DNA
tgcggaacatgggatatcagcctgagtgcccgggtgttc

SEQ ID NO: 1949 - DNA, 39 bp, synthetic construct
  source 1..39: mol_type = other DNA
tgcggaacatgggatatcagcctgagtgccctggtgttc

SEQ ID NO: 1950 - DNA, 39 bp, synthetic construct
  source 1..39: mol_type = other DNA
tgcggaacatgggatattagcctgagtgcccatgtcttc

SEQ ID NO: 1951 - DNA, 42 bp, synthetic construct
  source 1..42: mol_type = other DNA
tgcggaacatgggatatcagcctgagtgctggggtggtattc

SEQ ID NO: 1952 - DNA, 45 bp, synthetic construct
  source 1..45: mol_type = other DNA
tgcggaacatgggatatcagcctgagtgccggcccttatgtcttc

SEQ ID NO: 1953 - DNA, 42 bp, synthetic construct
  source 1..42: mol_type = other DNA
tgcggcacatgggatatcagcctgagtgctggaggggtgttc

SEQ ID NO: 1954 - DNA, 39 bp, synthetic construct
  source 1..39: mol_type = other DNA
tgcggaacatgggatatcagcctgagtgctgaggttttc

SEQ ID NO: 1955 - DNA, 39 bp, synthetic construct
  source 1..39: mol_type = other DNA
tgcggaacatgggatatcagcctgagtgctgctgtgttc

SEQ ID NO: 1956 - DNA, 36 bp, synthetic construct
  source 1..36: mol_type = other DNA
tgcggaacatgggatatcagcctgcgtgctgtgttc

SEQ ID NO: 1957 - DNA, 39 bp, synthetic construct
  source 1..39: mol_type = other DNA
tgcggaacatgggatattagcctgaatactggggtgttc

SEQ ID NO: 1958 - DNA, 39 bp, synthetic construct
  source 1..39: mol_type = other DNA
tgcggaacatgggatatcagcctaaataattatgtcttc

SEQ ID NO: 1959 - DNA, 39 bp, synthetic construct
  source 1..39: mol_type = other DNA
tgcggaacatgggatatcagcctaattgctggggtattc

SEQ ID NO: 1960 - DNA, 39 bp, synthetic construct
  source 1..39: mol_type = other DNA
tgcggaacatgggatatcagcctgcatacttggctgttc

SEQ ID NO: 1961 - DNA, 42 bp, synthetic construct
  source 1..42: mol_type = other DNA
tgcggaacatgggatatccgcctgaccgatgagctgttattc

SEQ ID NO: 1962 - DNA, 39 bp, synthetic construct
  source 1..39: mol_type = other DNA
tgcggaacatgggatatcagactgagcggttttgttttc

SEQ ID NO: 1963 - DNA, 48 bp, synthetic construct
  source 1..48: mol_type = other DNA
tgcggaacatgggatatcaacctgggtgctgggggcctttatgtcttc

SEQ ID NO: 1964 - DNA, 39 bp, synthetic construct
  source 1..39: mol_type = other DNA
tgcggaacatgggatatcatcctgagtgctgaggtattc

SEQ ID NO: 1965 - DNA, 36 bp, synthetic construct
  source 1..36: mol_type = other DNA
tgcggaacatgggatcacaccctgagtgctgtcttc

SEQ ID NO: 1966 - DNA, 39 bp, synthetic construct
  source 1..39: mol_type = other DNA
tgcggaacatgggaccacactctgcttactgtgttattc

SEQ ID NO: 1967 - DNA, 39 bp, synthetic construct
  source 1..39: mol_type = other DNA
tgcggaacatgggatcacagcctgactgctgtggtattc

SEQ ID NO: 1968 - DNA, 39 bp, synthetic construct
  source 1..39: mol_type = other DNA
tgcggaacctgggatcacagcctgactgctgggatattc

SEQ ID NO: 1969 - DNA, 39 bp, synthetic construct
  source 1..39: mol_type = other DNA
tgcggaacatgggatcacagcctgagtgttgtattattc

SEQ ID NO: 1970 - DNA, 36 bp, synthetic construct
  source 1..36: mol_type = other DNA
tgcggaacatgggatcacagcctgagtttggtattc

SEQ ID NO: 1971 - DNA, 39 bp, synthetic construct
  source 1..39: mol_type = other DNA
tgcggaacatgggatcacagcctgtctattggggttttc

SEQ ID NO: 1972 - DNA, 39 bp, synthetic construct
  source 1..39: mol_type = other DNA
tgcggaacatgggatcacagcctgagtgctggggtgttc

SEQ ID NO: 1973 - DNA, 39 bp, synthetic construct
  source 1..39: mol_type = other DNA
tgtggaacttgggatcacagcctgagtgctttcgtgttc

SEQ ID NO: 1974 - DNA, 39 bp, synthetic construct
  source 1..39: mol_type = other DNA
tgcggaacatgggatcacagtctgagtgctgctgttttc

SEQ ID NO: 1975 - DNA, 36 bp, synthetic construct
  source 1..36: mol_type = other DNA
tgcggaacatgggaccacaatctgcgtgctgtcttc

SEQ ID NO: 1976 - DNA, 39 bp, synthetic construct
  source 1..39: mol_type = other DNA
tgcgggacatgggatttcaccctgagtgttgggcgcttc

SEQ ID NO: 1977 - DNA, 39 bp, synthetic construct
  source 1..39: mol_type = other DNA
tgcggaacatgggatttcaccctgagtgctcctgtcttc

SEQ ID NO: 1978 - DNA, 42 bp, synthetic construct
  source 1..42: mol_type = other DNA
tgcggaacgtgggatttcagcgtgagtgctgggtgggtgttc

SEQ ID NO: 1979 - DNA, 39 bp, synthetic construct
  source 1..39: mol_type = other DNA
tgcggaacgtgggatttcagtcttactacctggttattc

SEQ ID NO: 1980 - DNA, 39 bp, synthetic construct
  source 1..39: mol_type = other DNA
tgcggaacatgggatttcagcctgagtgtttgggtgttc

SEQ ID NO: 1981 - DNA, 39 bp, synthetic construct
  source 1..39: mol_type = other DNA
tgcggaacatgggatttcagcctgagtactggggttttc

SEQ ID NO: 1982 - DNA, 39 bp, synthetic construct
  source 1..39: mol_type = other DNA
tgcggcacatgggatttcagcctgagtggtgtggtattc

SEQ ID NO: 1983 - DNA, 39 bp, synthetic construct
  source 1..39: mol_type = other DNA
tgcggaacatgggatttcagcctgagtggtttcgtgttc

SEQ ID NO: 1984 - DNA, 39 bp, synthetic construct
  source 1..39: mol_type = other DNA
tgcggaacatgggatttcagcctgagtgctggggtgttc

SEQ ID NO: 1985 - DNA, 39 bp, synthetic construct
  source 1..39: mol_type = other DNA
tgcggaacatgggatgaaaccgtgagaggttgggtgttc

SEQ ID NO: 1986 - DNA, 39 bp, synthetic construct
  source 1..39: mol_type = other DNA
tgcggaacatgggatgaaagtctgagaagctgggtgttc

SEQ ID NO: 1987 - DNA, 45 bp, synthetic construct
  source 1..45: mol_type = other DNA
tgcggaacttgggatgagaggcagactgatgagtcctatgtcttc

SEQ ID NO: 1988 - DNA, 42 bp, synthetic construct
  source 1..42: mol_type = other DNA
tgcggaacatgggatgagagactcgttgctggccaggtcttc

SEQ ID NO: 1989 - DNA, 42 bp, synthetic construct
  source 1..42: mol_type = other DNA
tgcggaacatgggatgagagactgagtcctggagcttttttc

SEQ ID NO: 1990 - DNA, 27 bp, synthetic construct
  source 1..27: mol_type = other DNA
tgcggaacatgggatgagaaggtgttc

SEQ ID NO: 1991 - DNA, 45 bp, synthetic construct
  source 1..45: mol_type = other DNA
tgcggaacctgggatgaaggccagactactgatttctttgtcttc

SEQ ID NO: 1992 - DNA, 39 bp, synthetic construct
  source 1..39: mol_type = other DNA
tgcggaacatgggatgacaccctggctggtgtggtcttc

SEQ ID NO: 1993 - DNA, 39 bp, synthetic construct
  source 1..39: mol_type = other DNA
tgcggaacatgggatgacaggctgacttctgcggtcttc

SEQ ID NO: 1994 - DNA, 39 bp, synthetic construct
  source 1..39: mol_type = other DNA
tgcggaacatgggatgacagactgtttgttgtggtattc

SEQ ID NO: 1995 - DNA, 39 bp, synthetic construct
  source 1..39: mol_type = other DNA
tgcggaacatgggatgataacctgagaggttgggtgttc

SEQ ID NO: 1996 - DNA, 39 bp, synthetic construct
  source 1..39: mol_type = other DNA
tgcggaacatgggatgacaacctgcgtggtgtcgtgttc

SEQ ID NO: 1997 - DNA, 42 bp, synthetic construct
  source 1..42: mol_type = other DNA
tgcggaacctgggatgacaatttgaatattggaagggtgttc

SEQ ID NO: 1998 - DNA, 39 bp, synthetic construct
  source 1..39: mol_type = other DNA
tgcggaacatgggatgacatcctgagtgctgtgatattc

SEQ ID NO: 1999 - DNA, 39 bp, synthetic construct
  source 1..39: mol_type = other DNA
tgcggaacatgggatgatatcctgagaggttgggtgttc

SEQ ID NO: 2000 - DNA, 42 bp, synthetic construct
  source 1..42: mol_type = other DNA
tgcggaacatgggatgccaccctgagtcctgggtggttattc

SEQ ID NO: 2001 - DNA, 39 bp, synthetic construct
  source 1..39: mol_type = other DNA
tgcggaacatgggatgccagcgtgacttcttgggtgttc

SEQ ID NO: 2002 - DNA, 39 bp, synthetic construct
  source 1..39: mol_type = other DNA
tgcggaacatgggatgccagcctgacttctgtggtcttc

SEQ ID NO: 2003 - DNA, 39 bp, synthetic construct
  source 1..39: mol_type = other DNA
tgcggaacatgggatgccagcctgagtgtttgggtgttc

SEQ ID NO: 2004 - DNA, 42 bp, synthetic construct
  source 1..42: mol_type = other DNA
tgcggaacatgggatgccagcctgagtgttccttgggtgttc

SEQ ID NO: 2005 - DNA, 39 bp, synthetic construct
  source 1..39: mol_type = other DNA
tgcggaacatgggatgccagcctgagtgtggcggtattc

SEQ ID NO: 2006 - DNA, 39 bp, synthetic construct
  source 1..39: mol_type = other DNA
tgcggaacatgggatgccagcctgagtacctgggtattc

SEQ ID NO: 2007 - DNA, 39 bp, synthetic construct
  source 1..39: mol_type = other DNA
tgcggaacatgggatgccagcctgagtggtgtggtattc

SEQ ID NO: 2008 - DNA, 42 bp, synthetic construct
  source 1..42: mol_type = other DNA
tgcggaacatgggatgccagcctgagtggtgggggagaattc

SEQ ID NO: 2009 - DNA, 39 bp, synthetic construct
  source 1..39: mol_type = other DNA
tgcggaacatgggatgccagcctgagtgctggggtgttc

SEQ ID NO: 2010 - DNA, 39 bp, synthetic construct
  source 1..39: mol_type = other DNA
tgcggaacatgggatgccagcctgagtgctgggcttttc

SEQ ID NO: 2011 - DNA, 39 bp, synthetic construct
  source 1..39: mol_type = other DNA
tgtggcacatgggatgccagcctgagtgctgaagtcttc

SEQ ID NO: 2012 - DNA, 45 bp, synthetic construct
  source 1..45: mol_type = other DNA
tgcggaacatgggatgccagcctgagtgctgacttttgggtgttc

SEQ ID NO: 2013 - DNA, 36 bp, synthetic construct
  source 1..36: mol_type = other DNA
tgcggaacatgggatgccagcctgagagtcttcttc

SEQ ID NO: 2014 - DNA, 39 bp, synthetic construct
  source 1..39: mol_type = other DNA
tgcggaacatgggatgccagtctgagggctgtggtactc

SEQ ID NO: 2015 - DNA, 39 bp, synthetic construct
  source 1..39: mol_type = other DNA
tgcggaacatgggatgccagcctgaatatttgggttttc

SEQ ID NO: 2016 - DNA, 39 bp, synthetic construct
  source 1..39: mol_type = other DNA
tgcgggacatgggatgccagcctgaagaatctggtcttc

SEQ ID NO: 2017 - DNA, 39 bp, synthetic construct
  source 1..39: mol_type = other DNA
tgcggaacatgggatgccagcctgggtgcctgggtattc

SEQ ID NO: 2018 - DNA, 39 bp, synthetic construct
  source 1..39: mol_type = other DNA
tgcggaacatgggatgccagcctgggtgctgtggtcttc

SEQ ID NO: 2019 - DNA, 39 bp, synthetic construct
  source 1..39: mol_type = other DNA
tgcggaacatgggatgccagcctgggtgcgggggtcttc

SEQ ID NO: 2020 - DNA, 42 bp, synthetic construct
  source 1..42: mol_type = other DNA
tgcggaacatgggatgctaggctgagtggcctttatgtcttc

SEQ ID NO: 2021 - DNA, 39 bp, synthetic construct
  source 1..39: mol_type = other DNA
tgtggaacctgggatgcgagactgggtggtgcagtcttc

SEQ ID NO: 2022 - DNA, 39 bp, synthetic construct
  source 1..39: mol_type = other DNA
tgcggaacatgggatgccaatctgcgtgctggggtcttc

SEQ ID NO: 2023 - DNA, 39 bp, synthetic construct
  source 1..39: mol_type = other DNA
tgcggaacatgggatgctatcataagtggttgggtgttc

SEQ ID NO: 2024 - DNA, 39 bp, synthetic construct
  source 1..39: mol_type = other DNA
tgcggaacatgggatgccggccagagtgtttgggtgttc

SEQ ID NO: 2025 - DNA, 42 bp, synthetic construct
  source 1..42: mol_type = other DNA
tgcggcacatgggatgccgggctgactggcctttatgtcttc

SEQ ID NO: 2026 - DNA, 39 bp, synthetic construct
  source 1..39: mol_type = other DNA
tgcggaacttgggatgccggtctgagtgtttatgtcttc

SEQ ID NO: 2027 - DNA, 39 bp, synthetic construct
  source 1..39: mol_type = other DNA
tgcgggacatgggatgccggcctgagtactggggtcttc

SEQ ID NO: 2028 - DNA, 39 bp, synthetic construct
  source 1..39: mol_type = other DNA
tgcggaacatgggatgccggcctgagtggggacgttttc

SEQ ID NO: 2029 - DNA, 42 bp, synthetic construct
  source 1..42: mol_type = other DNA
tgcggaacatgggatgccggcctgagtgctggttatgtcttc

SEQ ID NO: 2030 - DNA, 39 bp, synthetic construct
  source 1..39: mol_type = other DNA
tgcggaacatgggatgccggcctgcgtgtttgggtgttc

SEQ ID NO: 2031 - DNA, 36 bp, synthetic construct
  source 1..36: mol_type = other DNA
tgcggaacatgggatgccggcctgagggaaattttc

SEQ ID NO: 2032 - DNA, 39 bp, synthetic construct
  source 1..39: mol_type = other DNA
tgcggaacatgggccagcagcctgagttcttgggtgttc

SEQ ID NO: 2033 - DNA, 39 bp, synthetic construct
  source 1..39: mol_type = other DNA
tgcggaacatgggctggcagcctgagtggtcatgtcttc

SEQ ID NO: 2034 - DNA, 42 bp, synthetic construct
  source 1..42: mol_type = other DNA
tgcggaacatgggctggcagcctgagtgccgcttgggtgttc

SEQ ID NO: 2035 - DNA, 42 bp, synthetic construct
  source 1..42: mol_type = other DNA
tgcggaacatgggctggcagcctgaatgtttattgggtgttc

SEQ ID NO: 2036 - DNA, 42 bp, synthetic construct
  source 1..42: mol_type = other DNA
tgcggaacatgggctggcaacctgagacctaattgggtgttc

SEQ ID NO: 2037 - DNA, 36 bp, synthetic construct
  source 1..36: mol_type = other DNA
tgcggaacaaggggtagcctgggtggtgcggtgttc

SEQ ID NO: 2038 - DNA, 39 bp, synthetic construct
  source 1..39: mol_type = other DNA
tgcggaacaagggataccaccctgagtgtcccggtgttc

SEQ ID NO: 2039 - DNA, 39 bp, synthetic construct
  source 1..39: mol_type = other DNA
tgcggaacacgggataccagcctcaatattgaaatcttc

SEQ ID NO: 2040 - DNA, 36 bp, synthetic construct
  source 1..36: mol_type = other DNA
tgtggaacacgggataccagcctgaatgatgtcttc

SEQ ID NO: 2041 - DNA, 39 bp, synthetic construct
  source 1..39: mol_type = other DNA
tgcggaacacgggatacccgcctgagtattgtggttttc

SEQ ID NO: 2042 - DNA, 39 bp, synthetic construct
  source 1..39: mol_type = other DNA
tgcggcacacgggataccatcctgagtgctgaggtgttc

SEQ ID NO: 2043 - DNA, 39 bp, synthetic construct
  source 1..39: mol_type = other DNA
tgcggaacacgggatagaagcctgagtggttgggtgttc

SEQ ID NO: 2044 - DNA, 33 bp, synthetic construct
  source 1..33: mol_type = other DNA
tgcggatcatggtattacaatgtcttccttttc

SEQ ID NO: 2045 - DNA, 39 bp, synthetic construct
  source 1..39: mol_type = other DNA
tgcggatcttggcatagcagcctcaaccttgtcgtcttc

SEQ ID NO: 2046 - DNA, 42 bp, synthetic construct
  source 1..42: mol_type = other DNA
tgcggatcatggggtagtggcctgagtgccccttatgtcttc

SEQ ID NO: 2047 - DNA, 39 bp, synthetic construct
  source 1..39: mol_type = other DNA
tgcggttcgtgggaaagcggcctgggtgcttggctgttc

SEQ ID NO: 2048 - DNA, 33 bp, synthetic construct
  source 1..33: mol_type = other DNA
tgcggatcctgggattacggcctcctactcttc

SEQ ID NO: 2049 - DNA, 36 bp, synthetic construct
  source 1..36: mol_type = other DNA
tgcggttcatgggatgtcagcctgactgctgttttc

SEQ ID NO: 2050 - DNA, 39 bp, synthetic construct
  source 1..39: mol_type = other DNA
tgcggatcctgggatgtcagtctcaatgttggcattttc

SEQ ID NO: 2051 - DNA, 39 bp, synthetic construct
  source 1..39: mol_type = other DNA
tgcggatcatgggataccaccctgcgtgcttgggtgttc

SEQ ID NO: 2052 - DNA, 42 bp, synthetic construct
  source 1..42: mol_type = other DNA
tgcggctcgtgggataccagccctgtccgtgcttgggtgttc

SEQ ID NO: 2053 - DNA, 39 bp, synthetic construct
  source 1..39: mol_type = other DNA
tgcggatcatgggataccagcctgagtgtttgggtgttc

SEQ ID NO: 2054 - DNA, 39 bp, synthetic construct
  source 1..39: mol_type = other DNA
tgcggatcatgggataccagcctgagtgctgaggtgttc

SEQ ID NO: 2055 - DNA, 39 bp, synthetic construct
  source 1..39: mol_type = other DNA
tgcggctcgtgggataccagcctgcgtgcttgggtgttc

SEQ ID NO: 2056 - DNA, 39 bp, synthetic construct
  source 1..39: mol_type = other DNA
tgcggctcgtgggataccagcctgcgtgcttgggcgttc

SEQ ID NO: 2057 - DNA, 39 bp, synthetic construct
  source 1..39: mol_type = other DNA
tgcggatcatgggataccagcctggatgctaggctgttc

SEQ ID NO: 2058 - DNA, 39 bp, synthetic construct
  source 1..39: mol_type = other DNA
tgcggatcatgggataccatcctgcttgtctatgtcttc

SEQ ID NO: 2059 - DNA, 36 bp, synthetic construct
  source 1..36: mol_type = other DNA
tgcggatcatgggatcgctggcaggctgctgtcttc

SEQ ID NO: 2060 - DNA, 39 bp, synthetic construct
  source 1..39: mol_type = other DNA
tgcggatcatgggataggagcctgagtgggtatgtcttc

SEQ ID NO: 2061 - DNA, 39 bp, synthetic construct
  source 1..39: mol_type = other DNA
tgcggatcatgggatagaagcctgagtgcttatgtcttc

SEQ ID NO: 2062 - DNA, 39 bp, synthetic construct
  source 1..39: mol_type = other DNA
tgcggatcatgggataggagcctgagtgccgtggttttc

SEQ ID NO: 2063 - DNA, 39 bp, synthetic construct
  source 1..39: mol_type = other DNA
tgcggatcatgggataacaccttgggtgttgttctcttc

SEQ ID NO: 2064 - DNA, 39 bp, synthetic construct
  source 1..39: mol_type = other DNA
tgcggatcgtgggataacagactaagtactgtcatcttc

SEQ ID NO: 2065 - DNA, 39 bp, synthetic construct
  source 1..39: mol_type = other DNA
tgcggaagctgggataatcgattgaacactgtgattttc

SEQ ID NO: 2066 - DNA, 42 bp, synthetic construct
  source 1..42: mol_type = other DNA
tgcggttcatgggatctcagccctgtacgtgtccttgtgttc

SEQ ID NO: 2067 - DNA, 39 bp, synthetic construct
  source 1..39: mol_type = other DNA
tgcggatcatgggatctcagcctgagtgctgtcgttttc

SEQ ID NO: 2068 - DNA, 39 bp, synthetic construct
  source 1..39: mol_type = other DNA
tgcggatcatgggataaaaacctgcgtgctgtgctgttc

SEQ ID NO: 2069 - DNA, 39 bp, synthetic construct
  source 1..39: mol_type = other DNA
tgcggctcatgggatatcagcctgagtgctggggtgttc

SEQ ID NO: 2070 - DNA, 39 bp, synthetic construct
  source 1..39: mol_type = other DNA
tgcggatcatgggatatcagactgagtgcagaggtcttc

SEQ ID NO: 2071 - DNA, 39 bp, synthetic construct
  source 1..39: mol_type = other DNA
tgcggatcatgggacatcaaactgaatattggggtattc

SEQ ID NO: 2072 - DNA, 39 bp, synthetic construct
  source 1..39: mol_type = other DNA
tgcggatcatgggatttcagtctcaattattttgtcttc

SEQ ID NO: 2073 - DNA, 39 bp, synthetic construct
  source 1..39: mol_type = other DNA
tgcggatcatgggatgccagcctgagtactgaggtgttc

SEQ ID NO: 2074 - DNA, 39 bp, synthetic construct
  source 1..39: mol_type = other DNA
tgcggatcctgggatgccggcctgcgtggctgggttttc

SEQ ID NO: 2075 - DNA, 39 bp, synthetic construct
  source 1..39: mol_type = other DNA
tgcggaagatgggagagcagcctgggtgctgtggttttc

SEQ ID NO: 2076 - DNA, 39 bp, synthetic construct
  source 1..39: mol_type = other DNA
tgcggaagatgggattttagtctgagtgcttatgtcttc

SEQ ID NO: 2077 - DNA, 39 bp, synthetic construct
  source 1..39: mol_type = other DNA
tgcggacaatgggataacgacctgagtgtttgggtgttc

SEQ ID NO: 2078 - DNA, 42 bp, synthetic construct
  source 1..42: mol_type = other DNA
tgcggaccctggcatagcagcgtgactagtggccacgtgctc

SEQ ID NO: 2079 - DNA, 45 bp, synthetic construct
  source 1..45: mol_type = other DNA
tgcggattatgggatgccagcctgagtgctcctacttgggtgttc

SEQ ID NO: 2080 - DNA, 39 bp, synthetic construct
  source 1..39: mol_type = other DNA
tgtggaatatggcacactagcctgagtgcttgggtgttc

SEQ ID NO: 2081 - DNA, 39 bp, synthetic construct
  source 1..39: mol_type = other DNA
tgcggaatatgggattacagcctggatacttgggtgttc

SEQ ID NO: 2082 - DNA, 39 bp, synthetic construct
  source 1..39: mol_type = other DNA
tgcggcatatgggataccagcctgagtgcttgggtgttc

SEQ ID NO: 2083 - DNA, 39 bp, synthetic construct
  source 1..39: mol_type = other DNA
tgcggaatttgggataccaggctgagtgtttatgtcttc

SEQ ID NO: 2084 - DNA, 39 bp, synthetic construct
  source 1..39: mol_type = other DNA
tgcggaatttgggataccaggctgagtgtttatatcttc

SEQ ID NO: 2085 - DNA, 36 bp, synthetic construct
  source 1..36: mol_type = other DNA
tgtggaatatgggatacgaatctgggttatctcttc

SEQ ID NO: 2086 - DNA, 39 bp, synthetic construct
  source 1..39: mol_type = other DNA
tgcggtatatgggataccggcctgagtgctgtggtattc

SEQ ID NO: 2087 - DNA, 39 bp, synthetic construct
  source 1..39: mol_type = other DNA
tgcggaatatgggatcgcagcctgagtgcttgggtgttt

SEQ ID NO: 2088 - DNA, 39 bp, synthetic construct
  source 1..39: mol_type = other DNA
tgcggaattcgggataccaggctgagtgtttatgtcttc

SEQ ID NO: 2089 - DNA, 42 bp, synthetic construct
  source 1..42: mol_type = other DNA
tgcggaggatggagtagcagactgggtgttggcccagtgttt

SEQ ID NO: 2090 - DNA, 39 bp, synthetic construct
  source 1..39: mol_type = other DNA
tgcggaggatggggtagcggcctgagtgcttgggtgttc

SEQ ID NO: 2091 - DNA, 39 bp, synthetic construct
  source 1..39: mol_type = other DNA
tgcggaggatgggataccagcctgagtgcttgggtgttc

SEQ ID NO: 2092 - DNA, 39 bp, synthetic construct
  source 1..39: mol_type = other DNA
tgcggaggatgggataggggcctggatgcttgggttttc

SEQ ID NO: 2093 - DNA, 33 bp, synthetic construct
  source 1..33: mol_type = other DNA
tgcggagcatggcgtaataacgtgtgggtgttc

SEQ ID NO: 2094 - DNA, 48 bp, synthetic construct
  source 1..48: mol_type = other DNA
tgcggagcatggaacaggcgcctgaatcctcattctcattgggtgttc

SEQ ID NO: 2095 - DNA, 36 bp, synthetic construct
  source 1..36: mol_type = other DNA
tgcggagcctggcacaacaaactgagcgcggtcttc

SEQ ID NO: 2096 - DNA, 39 bp, synthetic construct
  source 1..39: mol_type = other DNA
tgcggagcatggggtagcagcctgagagctagtgtcttc

SEQ ID NO: 2097 - DNA, 39 bp, synthetic construct
  source 1..39: mol_type = other DNA
tgcggagcatggggtagcggcctgagtgcttgggtgttc

SEQ ID NO: 2098 - DNA, 42 bp, synthetic construct
  source 1..42: mol_type = other DNA
tgcggagcatgggaaagtagcctgagtgccccttatgtcttc

SEQ ID NO: 2099 - DNA, 39 bp, synthetic construct
  source 1..39: mol_type = other DNA
tgcggagcatgggagagcagcctcaatgttggactgatc

SEQ ID NO: 2100 - DNA, 42 bp, synthetic construct
  source 1..42: mol_type = other DNA
tgcggagcatgggagagcggccggagtgctggggtggtgttc

SEQ ID NO: 2101 - DNA, 39 bp, synthetic construct
  source 1..39: mol_type = other DNA
tgcggagcttgggattacagtgtgagtggttgggtgttc

SEQ ID NO: 2102 - DNA, 39 bp, synthetic construct
  source 1..39: mol_type = other DNA
tgcggagcatgggattacagcctgactgccggagtattc

SEQ ID NO: 2103 - DNA, 39 bp, synthetic construct
  source 1..39: mol_type = other DNA
tgcggagcctgggattacagactgagtgccgtgctattc

SEQ ID NO: 2104 - DNA, 39 bp, synthetic construct
  source 1..39: mol_type = other DNA
tgcggagcgtgggatgttcgtctggatgttggggtgttc

SEQ ID NO: 2105 - DNA, 33 bp, synthetic construct
  source 1..33: mol_type = other DNA
tgcggagcatgggatacctacagttatgtcttc

SEQ ID NO: 2106 - DNA, 39 bp, synthetic construct
  source 1..39: mol_type = other DNA
tgcggagcatgggatacgaccctgagtggtgtggtattc

SEQ ID NO: 2107 - DNA, 39 bp, synthetic construct
  source 1..39: mol_type = other DNA
tgcggagcgtgggatactaccctgagtgctgtgatattc

SEQ ID NO: 2108 - DNA, 42 bp, synthetic construct
  source 1..42: mol_type = other DNA
tgcggcgcatgggataccagccagggtgcgtcttatgtcttt

SEQ ID NO: 2109 - DNA, 42 bp, synthetic construct
  source 1..42: mol_type = other DNA
tgcggagcatgggataccagccctgtacgtgctggggtgttc

SEQ ID NO: 2110 - DNA, 33 bp, synthetic construct
  source 1..33: mol_type = other DNA
tgcggagcatgggataccagcctgtggcttttc

SEQ ID NO: 2111 - DNA, 39 bp, synthetic construct
  source 1..39: mol_type = other DNA
tgcggagcatgggataccagcctgactgtttatgtcttc

SEQ ID NO: 2112 - DNA, 39 bp, synthetic construct
  source 1..39: mol_type = other DNA
tgcggagcatgggacaccagtctgactgctggggtgttc

SEQ ID NO: 2113 - DNA, 39 bp, synthetic construct
  source 1..39: mol_type = other DNA
tgcggagcttgggataccagcctgagtactgtggttttc

SEQ ID NO: 2114 - DNA, 42 bp, synthetic construct
  source 1..42: mol_type = other DNA
tgcggagcatgggataccagcctgagttctagatacatattc

SEQ ID NO: 2115 - DNA, 39 bp, synthetic construct
  source 1..39: mol_type = other DNA
tgcggagcatgggataccagcctgagtggttatgtcttc

SEQ ID NO: 2116 - DNA, 39 bp, synthetic construct
  source 1..39: mol_type = other DNA
tgcggagcctgggataccagcctgagtggctgggtgttc

SEQ ID NO: 2117 - DNA, 39 bp, synthetic construct
  source 1..39: mol_type = other DNA
tgcggagcatgggataccagtctgagtggtgtgctattc

SEQ ID NO: 2118 - DNA, 39 bp, synthetic construct
  source 1..39: mol_type = other DNA
tgcggagcttgggataccagcttgagtggtcttgttttc

SEQ ID NO: 2119 - DNA, 39 bp, synthetic construct
  source 1..39: mol_type = other DNA
tgcggagcttgggataccagcttgagtggttttgttttc

SEQ ID NO: 2120 - DNA, 39 bp, synthetic construct
  source 1..39: mol_type = other DNA
tgcggagcatgggataccagcctgagtggtgaggtcttt

SEQ ID NO: 2121 - DNA, 39 bp, synthetic construct
  source 1..39: mol_type = other DNA
tgcggagcttgggataccagcttgagtgattttgttttc

SEQ ID NO: 2122 - DNA, 39 bp, synthetic construct
  source 1..39: mol_type = other DNA
tgcggagcatgggataccagcctgcgaactgcgatattc

SEQ ID NO: 2123 - DNA, 33 bp, synthetic construct
  source 1..33: mol_type = other DNA
tgcggagcatgggataccagcctgcggcttttc

SEQ ID NO: 2124 - DNA, 39 bp, synthetic construct
  source 1..39: mol_type = other DNA
tgcggagcatgggataccagcctgaatgttcatgtcttc

SEQ ID NO: 2125 - DNA, 39 bp, synthetic construct
  source 1..39: mol_type = other DNA
tgcggagcatgggataccagcctcaataaatgggtgttc

SEQ ID NO: 2126 - DNA, 39 bp, synthetic construct
  source 1..39: mol_type = other DNA
tgcggagcatgggatacccgcctcagtgcgcggctgttc

SEQ ID NO: 2127 - DNA, 39 bp, synthetic construct
  source 1..39: mol_type = other DNA
tgcggagcatgggataccagactgaggggttttattttc

SEQ ID NO: 2128 - DNA, 39 bp, synthetic construct
  source 1..39: mol_type = other DNA
tgcggagcatgggatactaatttggggaatgttctcctc

SEQ ID NO: 2129 - DNA, 39 bp, synthetic construct
  source 1..39: mol_type = other DNA
tgcggggcatgggataccaacctgggtaaatgggttttc

SEQ ID NO: 2130 - DNA, 39 bp, synthetic construct
  source 1..39: mol_type = other DNA
tgcggagcatgggataccggccttgagtggtatgttttt

SEQ ID NO: 2131 - DNA, 39 bp, synthetic construct
  source 1..39: mol_type = other DNA
tgcggagcatgggataggacttctggattgtggcttttc

SEQ ID NO: 2132 - DNA, 39 bp, synthetic construct
  source 1..39: mol_type = other DNA
tgcggagcgtgggatcgtagcctggttgctggactcttc

SEQ ID NO: 2133 - DNA, 39 bp, synthetic construct
  source 1..39: mol_type = other DNA
tgcggagcgtgggatagaagcctgactgtttatgtcttc

SEQ ID NO: 2134 - DNA, 39 bp, synthetic construct
  source 1..39: mol_type = other DNA
tgcggagcatgggatagaagcctgagtggttatgtcttc

SEQ ID NO: 2135 - DNA, 39 bp, synthetic construct
  source 1..39: mol_type = other DNA
tgcggagcatgggatagaagcctgagtgcttatgtcttc

SEQ ID NO: 2136 - DNA, 39 bp, synthetic construct
  source 1..39: mol_type = other DNA
tgcggagcatgggatagaagcctgagtgcggtggtattc

SEQ ID NO: 2137 - DNA, 39 bp, synthetic construct
  source 1..39: mol_type = other DNA
tgcggagcatgggatcgcagcctgagtgctggggttttc

SEQ ID NO: 2138 - DNA, 39 bp, synthetic construct
  source 1..39: mol_type = other DNA
tgcggagcgtgggatcgcagcctgcgtattgtggtattc

SEQ ID NO: 2139 - DNA, 39 bp, synthetic construct
  source 1..39: mol_type = other DNA
tgcggagcatgggatagaagtctgagggcttacgtcttc

SEQ ID NO: 2140 - DNA, 39 bp, synthetic construct
  source 1..39: mol_type = other DNA
tgcggagcatgggatagaagtctgaatgtttggctgttc

SEQ ID NO: 2141 - DNA, 42 bp, synthetic construct
  source 1..42: mol_type = other DNA
tgcggcgcctgggataggggcctgaatgtcggttggcttttc

SEQ ID NO: 2142 - DNA, 39 bp, synthetic construct
  source 1..39: mol_type = other DNA
tgcggcgcatgggataatagactgagtattttggccttc

SEQ ID NO: 2143 - DNA, 39 bp, synthetic construct
  source 1..39: mol_type = other DNA
tgcggagcttgggataatgacctgacagcttatgtcttc

SEQ ID NO: 2144 - DNA, 36 bp, synthetic construct
  source 1..36: mol_type = other DNA
tgcggggcatgggatttcagcctgactcctctcttc

SEQ ID NO: 2145 - DNA, 45 bp, synthetic construct
  source 1..45: mol_type = other DNA
tgcggagcctgggatgactatcggggtgtgagtatttatgtcttc

SEQ ID NO: 2146 - DNA, 42 bp, synthetic construct
  source 1..42: mol_type = other DNA
tgtggagcatgggatgaccggccttcgagtgccgtggttttc

SEQ ID NO: 2147 - DNA, 39 bp, synthetic construct
  source 1..39: mol_type = other DNA
tgcggagcatgggatgacagactgactgtcgttgttttc

SEQ ID NO: 2148 - DNA, 36 bp, synthetic construct
  source 1..36: mol_type = other DNA
tgcggagcgtgggatgacaggctgggtgctgtgttc

SEQ ID NO: 2149 - DNA, 42 bp, synthetic construct
  source 1..42: mol_type = other DNA
tgcggagcgtgggatgccagcctgaatcctggccgggcattc

SEQ ID NO: 2150 - DNA, 36 bp, synthetic construct
  source 1..36: mol_type = other DNA
tgcggagcatgggatgccggcctgagggaaattttc

SEQ ID NO: 2151 - DNA, 39 bp, synthetic construct
  source 1..39: mol_type = other DNA
tgcggagcttgggctggcagtccgagtccttgggttttc

SEQ ID NO: 2152 - DNA, 39 bp, synthetic construct
  source 1..39: mol_type = other DNA
tgcggagcattcgacaccaccctgagtgctggcgttttc

SEQ ID NO: 2153 - DNA, 39 bp, synthetic construct
  source 1..39: mol_type = other DNA
tgcgaaacatgggagagcagcctgagtgttggggtcttc

SEQ ID NO: 2154 - DNA, 39 bp, synthetic construct
  source 1..39: mol_type = other DNA
tgcgaaacatgggaaagcagcctgagggtttgggtgttc

SEQ ID NO: 2155 - DNA, 39 bp, synthetic construct
  source 1..39: mol_type = other DNA
tgcgaaacgtgggataccagcctgagtggtggggtgttc

SEQ ID NO: 2156 - DNA, 42 bp, synthetic construct
  source 1..42: mol_type = other DNA
tgcgaaacatgggataccagcctgagtgacttttatgtcttc

SEQ ID NO: 2157 - DNA, 36 bp, synthetic construct
  source 1..36: mol_type = other DNA
tgcgaaacatgggataccagcctgagtgccctcttc

SEQ ID NO: 2158 - DNA, 39 bp, synthetic construct
  source 1..39: mol_type = other DNA
tgcgaaacatgggataccagcctgcgtgctgaagtcttc

SEQ ID NO: 2159 - DNA, 39 bp, synthetic construct
  source 1..39: mol_type = other DNA
tgcgaaacatgggataccagcctgaatgttgtggtattc

SEQ ID NO: 2160 - DNA, 39 bp, synthetic construct
  source 1..39: mol_type = other DNA
tgcgaaacatgggataccagcctgggtgccgtggtgttc

SEQ ID NO: 2161 - DNA, 39 bp, synthetic construct
  source 1..39: mol_type = other DNA
tgcgaaacatgggatagaagcctgagtggtgtggtattc

SEQ ID NO: 2162 - DNA, 39 bp, synthetic construct
  source 1..39: mol_type = other DNA
tgcgaaacatgggataggagcctgagtgcttgggtgttt

SEQ ID NO: 2163 - DNA, 39 bp, synthetic construct
  source 1..39: mol_type = other DNA
tgcgaaacatgggatcgcagcctgagtgctgtggtcttc

SEQ ID NO: 2164 - DNA, 39 bp, synthetic construct
  source 1..39: mol_type = other DNA
tgcgagacgtgggatagaggcctgagtgttgtggttttc

SEQ ID NO: 2165 - DNA, 39 bp, synthetic construct
  source 1..39: mol_type = other DNA
tgcgaaacatgggataggggcctgagtgcagtggtattc

SEQ ID NO: 2166 - DNA, 39 bp, synthetic construct
  source 1..39: mol_type = other DNA
tgcgaaacatgggatcacaccctgagtgttgtgatattc

SEQ ID NO: 2167 - DNA, 39 bp, synthetic construct
  source 1..39: mol_type = other DNA
tgcgaaacatgggatgccagcctgactgttgtgttattc

SEQ ID NO: 2168 - DNA, 39 bp, synthetic construct
  source 1..39: mol_type = other DNA
tgcgaaacatgggatgccagcctgagtgctggggtgttc

SEQ ID NO: 2169 - DNA, 39 bp, synthetic construct
  source 1..39: mol_type = other DNA
tgcgaaacgtgggatgccggcctgagtgaggtggtgttc

SEQ ID NO: 2170 - DNA, 39 bp, synthetic construct
  source 1..39: mol_type = other DNA
tgcgaaacatttgataccagcctgagtgttgtagtcttc

SEQ ID NO: 2171 - DNA, 39 bp, synthetic construct
  source 1..39: mol_type = other DNA
tgcgaaacatttgataccagcctaaatattgtagtcttt

SEQ ID NO: 2172 - DNA, 39 bp, synthetic construct
  source 1..39: mol_type = other DNA
tgcgaatcatgggatagaagccggattggtgtggtcttc

SEQ ID NO: 2173 - DNA, 39 bp, synthetic construct
  source 1..39: mol_type = other DNA
tgcgaaagttgggacaggagtctgagtgcccgggtgtac

SEQ ID NO: 2174 - DNA, 39 bp, synthetic construct
  source 1..39: mol_type = other DNA
tgcgaatcctgggataggagcctgcgtgccgtggtcttc

SEQ ID NO: 2175 - DNA, 36 bp, synthetic construct
  source 1..36: mol_type = other DNA
tgcgaatcttgggatcgtagtttgattgtggtgttc

SEQ ID NO: 2176 - DNA, 39 bp, synthetic construct
  source 1..39: mol_type = other DNA
tgcgaaagttgggataacaatttaaatgaggtggttttc

SEQ ID NO: 2177 - DNA, 45 bp, synthetic construct
  source 1..45: mol_type = other DNA
tgcgaaatatgggagagcagcccgagtgctgacgatttggtgttc

SEQ ID NO: 2178 - DNA, 39 bp, synthetic construct
  source 1..39: mol_type = other DNA
tgcgaagcatgggataccagcctgagtggtgcggtgttc

SEQ ID NO: 2179 - DNA, 39 bp, synthetic construct
  source 1..39: mol_type = other DNA
tgcgaagcatgggataccagcctgagtgccggggtgttc

SEQ ID NO: 2180 - DNA, 39 bp, synthetic construct
  source 1..39: mol_type = other DNA
tgcgaagcatgggataccagcctgggtggtggggtgttc

SEQ ID NO: 2181 - DNA, 39 bp, synthetic construct
  source 1..39: mol_type = other DNA
tgcgaagcatgggatcgcagcctgactggtagcctgttc

SEQ ID NO: 2182 - DNA, 39 bp, synthetic construct
  source 1..39: mol_type = other DNA
tgcgaagcgtgggataggggcctgagtgcagtggtattc

SEQ ID NO: 2183 - DNA, 39 bp, synthetic construct
  source 1..39: mol_type = other DNA
tgcgaagcctgggataacatcctgagtactgtggtgttc

SEQ ID NO: 2184 - DNA, 39 bp, synthetic construct
  source 1..39: mol_type = other DNA
tgcgaagcatgggacatcagcctgagtgctggggtgttc

SEQ ID NO: 2185 - DNA, 39 bp, synthetic construct
  source 1..39: mol_type = other DNA
tgcgaagcatgggatgccgacctgagtggtgcggtgttc

SEQ ID NO: 2186 - DNA, 45 bp, synthetic construct
  source 1..45: mol_type = other DNA
tgcgcaacatggactggtagtttcagaactggccattatgtcttc

SEQ ID NO: 2187 - DNA, 39 bp, synthetic construct
  source 1..39: mol_type = other DNA
tgcgcaacatggagtagcagtcccagggggtgggtgttc

SEQ ID NO: 2188 - DNA, 42 bp, synthetic construct
  source 1..42: mol_type = other DNA
tgcgcaacatggcattacagcctgagtgctggccgagtgttc

SEQ ID NO: 2189 - DNA, 39 bp, synthetic construct
  source 1..39: mol_type = other DNA
tgcgcaacatggcataccagcctgagtattgtgcagttc

SEQ ID NO: 2190 - DNA, 42 bp, synthetic construct
  source 1..42: mol_type = other DNA
tgcgcaacatggcatagcaccctgagtgctgatgtgcttttc

SEQ ID NO: 2191 - DNA, 42 bp, synthetic construct
  source 1..42: mol_type = other DNA
tgcgcaacatggcatagcagcctgagtgctggccgactcttc

SEQ ID NO: 2192 - DNA, 39 bp, synthetic construct
  source 1..39: mol_type = other DNA
tgcgcaacatggcatatcgctcggagtgcctgggtgttc

SEQ ID NO: 2193 - DNA, 39 bp, synthetic construct
  source 1..39: mol_type = other DNA
tgcgcaacatggggtagtagtcagagtgccgtggtattc

SEQ ID NO: 2194 - DNA, 42 bp, synthetic construct
  source 1..42: mol_type = other DNA
tgcgcaacatggggtagcagcctgagtgctgggggtgttttc

SEQ ID NO: 2195 - DNA, 39 bp, synthetic construct
  source 1..39: mol_type = other DNA
tgtgcaacatgggaatacagcctgagtgttgtgctgttc

SEQ ID NO: 2196 - DNA, 42 bp, synthetic construct
  source 1..42: mol_type = other DNA
tgcgcaacatgggagaccacccgacgtgcctcttttgtcttc

SEQ ID NO: 2197 - DNA, 39 bp, synthetic construct
  source 1..39: mol_type = other DNA
tgcgcaacatgggagaccagcctgaatgtttatgtcttc

SEQ ID NO: 2198 - DNA, 39 bp, synthetic construct
  source 1..39: mol_type = other DNA
tgcgcaacatgggaaactagcctgaatgttgtggtcttc

SEQ ID NO: 2199 - DNA, 39 bp, synthetic construct
  source 1..39: mol_type = other DNA
tgcgcaacatgggagaccagcctgaatctttatgtcttc

SEQ ID NO: 2200 - DNA, 42 bp, synthetic construct
  source 1..42: mol_type = other DNA
tgcgcaacatgggagactggcctaagtgctggagaggtgttc

SEQ ID NO: 2201 - DNA, 39 bp, synthetic construct
  source 1..39: mol_type = other DNA
tgcgcgacgtgggagagtaccctaagtgttgtggttttc

SEQ ID NO: 2202 - DNA, 39 bp, synthetic construct
  source 1..39: mol_type = other DNA
tgcgcaacgtgggagagcagcctgagtatttttgtcttc

SEQ ID NO: 2203 - DNA, 42 bp, synthetic construct
  source 1..42: mol_type = other DNA
tgcgcaacatgggaaagcagcctcaacactttttatgtcttc

SEQ ID NO: 2204 - DNA, 45 bp, synthetic construct
  source 1..45: mol_type = other DNA
tgcgcaacatgggagagtagggtggatactcgagggttgttattc

SEQ ID NO: 2205 - DNA, 42 bp, synthetic construct
  source 1..42: mol_type = other DNA
tgcgcaacatgggagagcggcctgagtggtgcgggggtgttc

SEQ ID NO: 2206 - DNA, 42 bp, synthetic construct
  source 1..42: mol_type = other DNA
tgcgcaacatgggaaggcagcctcaacactttttatgtcttc

SEQ ID NO: 2207 - DNA, 39 bp, synthetic construct
  source 1..39: mol_type = other DNA
tgcgcaacttgggattatagcctgagtgctgtggtgttc

SEQ ID NO: 2208 - DNA, 39 bp, synthetic construct
  source 1..39: mol_type = other DNA
tgcgcaacatgggattacagactgagtattgtggtattc

SEQ ID NO: 2209 - DNA, 39 bp, synthetic construct
  source 1..39: mol_type = other DNA
tgcgcaacatgggattataacctgggagctgcggtgttc

SEQ ID NO: 2210 - DNA, 39 bp, synthetic construct
  source 1..39: mol_type = other DNA
tgcgccacatgggatgtcaccctgggtgtcttgcatttc

SEQ ID NO: 2211 - DNA, 39 bp, synthetic construct
  source 1..39: mol_type = other DNA
tgcgcaacatgggatacaacactgagtgtctgggtcttc

SEQ ID NO: 2212 - DNA, 39 bp, synthetic construct
  source 1..39: mol_type = other DNA
tgcgcaacatgggataccaccctgagtgtagtacttttc

SEQ ID NO: 2213 - DNA, 39 bp, synthetic construct
  source 1..39: mol_type = other DNA
tgcgcaacatgggataccaccctgagtgttgaggtcttc

SEQ ID NO: 2214 - DNA, 48 bp, synthetic construct
  source 1..48: mol_type = other DNA
tgcgcaacatgggataccagccccagcctgagtggtttttgggtgttc

SEQ ID NO: 2215 - DNA, 39 bp, synthetic construct
  source 1..39: mol_type = other DNA
tgcgcaacatgggataccagcctgactggtgtggtattc

SEQ ID NO: 2216 - DNA, 39 bp, synthetic construct
  source 1..39: mol_type = other DNA
tgcgcaacatgggataccagcctgactggtgcggtgttc

SEQ ID NO: 2217 - DNA, 39 bp, synthetic construct
  source 1..39: mol_type = other DNA
tgcgcaacatgggataccagcctgactgcctgggtattc

SEQ ID NO: 2218 - DNA, 39 bp, synthetic construct
  source 1..39: mol_type = other DNA
tgcgcaacatgggataccagcctgactgctgtggttttc

SEQ ID NO: 2219 - DNA, 39 bp, synthetic construct
  source 1..39: mol_type = other DNA
tgcgcaacatgggatactagcctgactgctaaggtgttc

SEQ ID NO: 2220 - DNA, 39 bp, synthetic construct
  source 1..39: mol_type = other DNA
tgcgcaacatgggacaccagcctgagtgttgtggttttc

SEQ ID NO: 2221 - DNA, 39 bp, synthetic construct
  source 1..39: mol_type = other DNA
tgcgctacttgggataccagcctgagtgttggggtattt

SEQ ID NO: 2222 - DNA, 39 bp, synthetic construct
  source 1..39: mol_type = other DNA
tgcgcaacatgggataccagcctgagttcttgggtgttc

SEQ ID NO: 2223 - DNA, 39 bp, synthetic construct
  source 1..39: mol_type = other DNA
tgcgcaacatgggataccagcctgagtggtggggtactc

SEQ ID NO: 2224 - DNA, 39 bp, synthetic construct
  source 1..39: mol_type = other DNA
tgcgcaacatgggataccagcctgagtggtggggtgttc

SEQ ID NO: 2225 - DNA, 42 bp, synthetic construct
  source 1..42: mol_type = other DNA
tgcgcaacatgggataccagcctgagtggtggccgagtgttc

SEQ ID NO: 2226 - DNA, 42 bp, synthetic construct
  source 1..42: mol_type = other DNA
tgcgcaacatgggataccagcctgagtggtgaccgagtgttc

SEQ ID NO: 2227 - DNA, 39 bp, synthetic construct
  source 1..39: mol_type = other DNA
tgcgcaacgtgggatactagcctgagtgaaggggtgttc

SEQ ID NO: 2228 - DNA, 39 bp, synthetic construct
  source 1..39: mol_type = other DNA
tgcgcaacctgggataccagcctgagtgccgtggtgctc

SEQ ID NO: 2229 - DNA, 36 bp, synthetic construct
  source 1..36: mol_type = other DNA
tgcgcaacatgggataccagcctgagtgctgtcttc

SEQ ID NO: 2230 - DNA, 39 bp, synthetic construct
  source 1..39: mol_type = other DNA
tgcgcgacatgggataccagcctgagtgctcgggtgttc

SEQ ID NO: 2231 - DNA, 36 bp, synthetic construct
  source 1..36: mol_type = other DNA
tgcgcaacatgggataccagcctgagtgccttattc

SEQ ID NO: 2232 - DNA, 39 bp, synthetic construct
  source 1..39: mol_type = other DNA
tgcgcaacatgggataccagcctgagtgctcatgtcttc

SEQ ID NO: 2233 - DNA, 42 bp, synthetic construct
  source 1..42: mol_type = other DNA
tgcgcaacatgggataccagcctgagtgctggccgggtgttc

SEQ ID NO: 2234 - DNA, 39 bp, synthetic construct
  source 1..39: mol_type = other DNA
tgcgcaacatgggataccagcctgagtgcggaggtcttc

SEQ ID NO: 2235 - DNA, 51 bp, synthetic construct
  source 1..51: mol_type = other DNA
tgcgcaacatgggataccagcctgagtgctgatgctggtgggggggtcttc

SEQ ID NO: 2236 - DNA, 39 bp, synthetic construct
  source 1..39: mol_type = other DNA
tgcgcaacatgggataccagcctgcgtgtcgtggtattc

SEQ ID NO: 2237 - DNA, 36 bp, synthetic construct
  source 1..36: mol_type = other DNA
tgcgcaacatgggataccagcctgagaggggtgttc

SEQ ID NO: 2238 - DNA, 39 bp, synthetic construct
  source 1..39: mol_type = other DNA
tgcgcaacatgggataccagcctgcctgcgtgggtgttc

SEQ ID NO: 2239 - DNA, 39 bp, synthetic construct
  source 1..39: mol_type = other DNA
tgtgcaacatgggataccagcctgaatgttggggtattc

SEQ ID NO: 2240 - DNA, 39 bp, synthetic construct
  source 1..39: mol_type = other DNA
tgcgcaacatgggataccagcctgggtattgtgttattt

SEQ ID NO: 2241 - DNA, 42 bp, synthetic construct
  source 1..42: mol_type = other DNA
tgcgcaacatgggacaccagcctgggtgcgcgtgtggtcttc

SEQ ID NO: 2242 - DNA, 36 bp, synthetic construct
  source 1..36: mol_type = other DNA
tgtgcaacgtgggataccagtctaggtgccttgttc

SEQ ID NO: 2243 - DNA, 39 bp, synthetic construct
  source 1..39: mol_type = other DNA
tgcgcaacatgggataccagcctggcgactggactgttc

SEQ ID NO: 2244 - DNA, 39 bp, synthetic construct
  source 1..39: mol_type = other DNA
tgcgcaacatgggataccagcctggctgcctgggtattc

SEQ ID NO: 2245 - DNA, 39 bp, synthetic construct
  source 1..39: mol_type = other DNA
tgcgcaacctgggataccaggctgagtgctgtggtcttc

SEQ ID NO: 2246 - DNA, 39 bp, synthetic construct
  source 1..39: mol_type = other DNA
tgcgcaacatgggataccaggctgagtgctggggtgttc

SEQ ID NO: 2247 - DNA, 39 bp, synthetic construct
  source 1..39: mol_type = other DNA
tgtgcaacgtgggacacacgtctacttattacggttttc

SEQ ID NO: 2248 - DNA, 39 bp, synthetic construct
  source 1..39: mol_type = other DNA
tgcgcaacatgggacaccctcctgagtgttgaactcttc

SEQ ID NO: 2249 - DNA, 42 bp, synthetic construct
  source 1..42: mol_type = other DNA
tgcgcaacatgggatactggccgcaatcctcatgtggtcttc

SEQ ID NO: 2250 - DNA, 39 bp, synthetic construct
  source 1..39: mol_type = other DNA
tgcgcaacatgggataccggcctgtcttcggtgttgttc

SEQ ID NO: 2251 - DNA, 36 bp, synthetic construct
  source 1..36: mol_type = other DNA
tgcgcaacgtgggataccggcctgagtgcggttttc

SEQ ID NO: 2252 - DNA, 39 bp, synthetic construct
  source 1..39: mol_type = other DNA
tgcgctacgtgggataggaccctgagtattggagtcttc

SEQ ID NO: 2253 - DNA, 39 bp, synthetic construct
  source 1..39: mol_type = other DNA
tgcgcaacgtgggatcgcagtgtgactgctgtgctcttc

SEQ ID NO: 2254 - DNA, 39 bp, synthetic construct
  source 1..39: mol_type = other DNA
tgcgcaacctgggataggagcctgagtggtgtggtgttc

SEQ ID NO: 2255 - DNA, 39 bp, synthetic construct
  source 1..39: mol_type = other DNA
tgcgcaacatgggatagaagcctgagtgctgtggtcttc

SEQ ID NO: 2256 - DNA, 45 bp, synthetic construct
  source 1..45: mol_type = other DNA
tgcgcaacatgggatagaagcctgagtgctgttccttgggtgttc

SEQ ID NO: 2257 - DNA, 39 bp, synthetic construct
  source 1..39: mol_type = other DNA
tgcgcaacatgggatcgcagcctgagtgctggggtgttc

SEQ ID NO: 2258 - DNA, 39 bp, synthetic construct
  source 1..39: mol_type = other DNA
tgcgcaacgtgggataggagcctgcgtgctggggtgttc

SEQ ID NO: 2259 - DNA, 39 bp, synthetic construct
  source 1..39: mol_type = other DNA
tgcgcaacatgggatcgcagtctgaatgtttatgtcctc

SEQ ID NO: 2260 - DNA, 39 bp, synthetic construct
  source 1..39: mol_type = other DNA
tgcgcaacgtgggatcgcatcctgagcgctgaggtgttc

SEQ ID NO: 2261 - DNA, 39 bp, synthetic construct
  source 1..39: mol_type = other DNA
tgcgcaacgtgggatagaggcctgagtactggggtgttc

SEQ ID NO: 2262 - DNA, 39 bp, synthetic construct
  source 1..39: mol_type = other DNA
tgcgcaacatgggataactacctgggtgctgccgtgttc

SEQ ID NO: 2263 - DNA, 42 bp, synthetic construct
  source 1..42: mol_type = other DNA
tgcgcaacatgggataacacgccttcgaatattgtggtattc

SEQ ID NO: 2264 - DNA, 39 bp, synthetic construct
  source 1..39: mol_type = other DNA
tgcgcaacatgggataatacactgagtgtgtgggtcttc

SEQ ID NO: 2265 - DNA, 42 bp, synthetic construct
  source 1..42: mol_type = other DNA
tgcgcaacatgggataacaccctgagtgtcaattgggtgttc

SEQ ID NO: 2266 - DNA, 42 bp, synthetic construct
  source 1..42: mol_type = other DNA
tgcgcaacctgggataacacactgaatgtcttttatgttttc

SEQ ID NO: 2267 - DNA, 39 bp, synthetic construct
  source 1..39: mol_type = other DNA
tgtgcgacatgggataatcggctcagttctgtggtcttc

SEQ ID NO: 2268 - DNA, 39 bp, synthetic construct
  source 1..39: mol_type = other DNA
tgcgcaacatgggataaccgcctgagtgctggggtgctc

SEQ ID NO: 2269 - DNA, 39 bp, synthetic construct
  source 1..39: mol_type = other DNA
tgcgcaacgtgggataacaggctgagtgctggggtgttc

SEQ ID NO: 2270 - DNA, 33 bp, synthetic construct
  source 1..33: mol_type = other DNA
tgcgcaacatgggataacagggattgggtcttc

SEQ ID NO: 2271 - DNA, 39 bp, synthetic construct
  source 1..39: mol_type = other DNA
tgcgcaacatgggataacaacctgggtgctggggtgttc

SEQ ID NO: 2272 - DNA, 39 bp, synthetic construct
  source 1..39: mol_type = other DNA
tgcgcaacatgggataacaagctgacttctggggtcttc

SEQ ID NO: 2273 - DNA, 39 bp, synthetic construct
  source 1..39: mol_type = other DNA
tgcgcaacatgggataacatcctgagtgcctgggtgttt

SEQ ID NO: 2274 - DNA, 39 bp, synthetic construct
  source 1..39: mol_type = other DNA
tgcgcaacctgggacaacgatatacattctgggctgttc

SEQ ID NO: 2275 - DNA, 36 bp, synthetic construct
  source 1..36: mol_type = other DNA
tgcgcaacttgggatctcagcctgagtgccctgttc

SEQ ID NO: 2276 - DNA, 39 bp, synthetic construct
  source 1..39: mol_type = other DNA
tgcgcaacatgggatatcaccctgagtgctgaggtgttc

SEQ ID NO: 2277 - DNA, 42 bp, synthetic construct
  source 1..42: mol_type = other DNA
tgcgcaacgtgggatatcagcccgagtgctggcggggtgttc

SEQ ID NO: 2278 - DNA, 45 bp, synthetic construct
  source 1..45: mol_type = other DNA
tgcgcaacatgggatatcagtctaagtactggccgggctgtgttc

SEQ ID NO: 2279 - DNA, 36 bp, synthetic construct
  source 1..36: mol_type = other DNA
tgcgcaacatgggatatcagtctgagtcaggtattc

SEQ ID NO: 2280 - DNA, 39 bp, synthetic construct
  source 1..39: mol_type = other DNA
tgcgcaacatgggatatcaggctgagtagtggagtgttc

SEQ ID NO: 2281 - DNA, 42 bp, synthetic construct
  source 1..42: mol_type = other DNA
tgcgcaacgtgggatatcggcccgagtgctggcggggtgttc

SEQ ID NO: 2282 - DNA, 39 bp, synthetic construct
  source 1..39: mol_type = other DNA
tgcgcaacatgggatcacagccgggctggtgtgctattc

SEQ ID NO: 2283 - DNA, 42 bp, synthetic construct
  source 1..42: mol_type = other DNA
tgcgcaacatgggatcacagtccgagtgttggagaagtcttc

SEQ ID NO: 2284 - DNA, 39 bp, synthetic construct
  source 1..39: mol_type = other DNA
tgcgcaacatgggatcacagcctgcgtgttggggtgttc

SEQ ID NO: 2285 - DNA, 39 bp, synthetic construct
  source 1..39: mol_type = other DNA
tgcgcaacatgggatcacagcctgaacattggggtgttc

SEQ ID NO: 2286 - DNA, 39 bp, synthetic construct
  source 1..39: mol_type = other DNA
tgcgcaacatgggatcacagcctgggtctttgggcattc

SEQ ID NO: 2287 - DNA, 36 bp, synthetic construct
  source 1..36: mol_type = other DNA
tgcgccacatgggatcacaatctgcgtcttgttttc

SEQ ID NO: 2288 - DNA, 39 bp, synthetic construct
  source 1..39: mol_type = other DNA
tgcgcgacttgggatcacatcctggcttctggggtgttc

SEQ ID NO: 2289 - DNA, 39 bp, synthetic construct
  source 1..39: mol_type = other DNA
tgcgcaacatgggatttcagcctgagtgtttgggtgttc

SEQ ID NO: 2290 - DNA, 39 bp, synthetic construct
  source 1..39: mol_type = other DNA
tgcgcaacatgggatttcagcctgagtgcttgggtgttc

SEQ ID NO: 2291 - DNA, 39 bp, synthetic construct
  source 1..39: mol_type = other DNA
tgcgcaacatgggatgacaccctcactgctggtgtgttc

SEQ ID NO: 2292 - DNA, 39 bp, synthetic construct
  source 1..39: mol_type = other DNA
tgcgcaacatgggacgacaggctgagtgctgtgcttttc

SEQ ID NO: 2293 - DNA, 39 bp, synthetic construct
  source 1..39: mol_type = other DNA
tgcgcaacatgggatgacaggctggatgctgcggtgttc

SEQ ID NO: 2294 - DNA, 39 bp, synthetic construct
  source 1..39: mol_type = other DNA
tgcgcaacatgggatgcgaccctgaatactggggtgttc

SEQ ID NO: 2295 - DNA, 39 bp, synthetic construct
  source 1..39: mol_type = other DNA
tgcgcaacatgggatgccagcctgagtgtttggctgctc

SEQ ID NO: 2296 - DNA, 39 bp, synthetic construct
  source 1..39: mol_type = other DNA
tgcgcgacatgggatgccagcctgagtggtggggtgttc

SEQ ID NO: 2297 - DNA, 39 bp, synthetic construct
  source 1..39: mol_type = other DNA
tgcgcaacacgggataccaccctcagcgccgttctgttc

SEQ ID NO: 2298 - DNA, 39 bp, synthetic construct
  source 1..39: mol_type = other DNA
tgcgctacattgggtagtagcctgagtctctgggtgttc

SEQ ID NO: 2299 - DNA, 39 bp, synthetic construct
  source 1..39: mol_type = other DNA
tgcgcaacaatcgaaactagcctgcctgcctgggtattc

SEQ ID NO: 2300 - DNA, 39 bp, synthetic construct
  source 1..39: mol_type = other DNA
tgcgcaacaggggacagaagcctgactgttgaggtattc

SEQ ID NO: 2301 - DNA, 36 bp, synthetic construct
  source 1..36: mol_type = other DNA
tgcgctacaggggatctcggcctgaccatagtcttc

SEQ ID NO: 2302 - DNA, 42 bp, synthetic construct
  source 1..42: mol_type = other DNA
tgcgcatcatgggattacagggggagatctggttgggtgttc

SEQ ID NO: 2303 - DNA, 39 bp, synthetic construct
  source 1..39: mol_type = other DNA
tgcgcatcatgggataccaccctgaatgttggggtgttc

SEQ ID NO: 2304 - DNA, 39 bp, synthetic construct
  source 1..39: mol_type = other DNA
tgcgcttcatgggataccaccctgggttttgtgttattc

SEQ ID NO: 2305 - DNA, 42 bp, synthetic construct
  source 1..42: mol_type = other DNA
tgcgcatcatgggataccagcctgagtggtggttatgtcttc

SEQ ID NO: 2306 - DNA, 39 bp, synthetic construct
  source 1..39: mol_type = other DNA
tgcgcatcatgggataccagcctccgtgctggggtgttc

SEQ ID NO: 2307 - DNA, 39 bp, synthetic construct
  source 1..39: mol_type = other DNA
tgcgcatcatgggataccagcctgggtgctggggtgttc

SEQ ID NO: 2308 - DNA, 39 bp, synthetic construct
  source 1..39: mol_type = other DNA
tgcgcatcatgggacagaggcctgagtgcagtggtgttc

SEQ ID NO: 2309 - DNA, 39 bp, synthetic construct
  source 1..39: mol_type = other DNA
tgtgctagttgggataacgtcctgcgtggtgtggtattc

SEQ ID NO: 2310 - DNA, 39 bp, synthetic construct
  source 1..39: mol_type = other DNA
tgcgcgtcatgggataacaggctgactgccgtggttttc

SEQ ID NO: 2311 - DNA, 36 bp, synthetic construct
  source 1..36: mol_type = other DNA
tgcgcatcatgggatgcaagcctgtccgtcgctttc

SEQ ID NO: 2312 - DNA, 39 bp, synthetic construct
  source 1..39: mol_type = other DNA
tgcgcttcgtgggatgccggcctgagttcttatgtcttc

SEQ ID NO: 2313 - DNA, 39 bp, synthetic construct
  source 1..39: mol_type = other DNA
tgcgcatccggggataccagcctgagtggtgtgatattc

SEQ ID NO: 2314 - DNA, 39 bp, synthetic construct
  source 1..39: mol_type = other DNA
tgcgcaagatggcatacgagcctaagtatttgggtcttc

SEQ ID NO: 2315 - DNA, 45 bp, synthetic construct
  source 1..45: mol_type = other DNA
tgcgcaatatgggataccggcctgagtcctggccaagttgccttc

SEQ ID NO: 2316 - DNA, 39 bp, synthetic construct
  source 1..39: mol_type = other DNA
tgcgcagcatggcatagcggcctgggtctcccggtcttc

SEQ ID NO: 2317 - DNA, 39 bp, synthetic construct
  source 1..39: mol_type = other DNA
tgcgcagcatgggattacagcctgagtgctggggtgttc

SEQ ID NO: 2318 - DNA, 39 bp, synthetic construct
  source 1..39: mol_type = other DNA
tgcgcagcctgggatactaccctgcgtgttaggctgttc

SEQ ID NO: 2319 - DNA, 39 bp, synthetic construct
  source 1..39: mol_type = other DNA
tgcgcagcatgggataccagcctgactgcctgggttttc

SEQ ID NO: 2320 - DNA, 39 bp, synthetic construct
  source 1..39: mol_type = other DNA
tgcgcagcatgggataccagcttgagtggtggggtgttc

SEQ ID NO: 2321 - DNA, 42 bp, synthetic construct
  source 1..42: mol_type = other DNA
tgcgcagcatgggataccagcctgagtggcgaggctgtgttc

SEQ ID NO: 2322 - DNA, 39 bp, synthetic construct
  source 1..39: mol_type = other DNA
tgcgcagcatgggataccagcttgagtggtgcggtgttc

SEQ ID NO: 2323 - DNA, 39 bp, synthetic construct
  source 1..39: mol_type = other DNA
tgcgcagcatgggataccagcctgagtgcctgggtgttc

SEQ ID NO: 2324 - DNA, 39 bp, synthetic construct
  source 1..39: mol_type = other DNA
tgcgcagcatgggataccagcctgagtgctggggtattc

SEQ ID NO: 2325 - DNA, 39 bp, synthetic construct
  source 1..39: mol_type = other DNA
tgcgcagcatgggataccagcctggatacttatgtcttc

SEQ ID NO: 2326 - DNA, 39 bp, synthetic construct
  source 1..39: mol_type = other DNA
tgcgctgcatgggatacccgtctgagtggtgtgttattc

SEQ ID NO: 2327 - DNA, 39 bp, synthetic construct
  source 1..39: mol_type = other DNA
tgcgcagcatgggataccaggctgagtgctggggtgttc

SEQ ID NO: 2328 - DNA, 39 bp, synthetic construct
  source 1..39: mol_type = other DNA
tgcgcagcatgggatcgcagtctgagtactggagttttc

SEQ ID NO: 2329 - DNA, 36 bp, synthetic construct
  source 1..36: mol_type = other DNA
tgcgcagcgtgggatatccgccggtctgtccttttc

SEQ ID NO: 2330 - DNA, 36 bp, synthetic construct
  source 1..36: mol_type = other DNA
tgcgctgcgtgggatcacactcagcgtctttccttc

SEQ ID NO: 2331 - DNA, 42 bp, synthetic construct
  source 1..42: mol_type = other DNA
tgcgcagcatgggatcacagcctgagtgctggccaggtgttc

SEQ ID NO: 2332 - DNA, 39 bp, synthetic construct
  source 1..39: mol_type = other DNA
tgcgcagcagtcgatactggtctgaaagaatgggtgttc

SEQ ID NO: 2333 - protein, 35 aa, synthetic construct
  VARIANT 15..17: note = Any amino acid
CARDLRELECEEWTXXXSRGPCVDPRGVAGSFDVW

SEQ ID NO: 2334 - protein, 24 aa, synthetic construct
  VARIANT 10..12: note = Any amino acid
CARDMYYDFXXXEVVPADDAFDIW

SEQ ID NO: 2335 - protein, 33 aa, synthetic construct
  VARIANT 17..19: note = Any amino acid
CARDGRGSLPRPKGGPXXXYDSSEDSGGAFDIW

SEQ ID NO: 2336 - protein, 21 aa, synthetic construct
  VARIANT 9..11: note = Any amino acid
CARANQHFXXXGYHYYGMDVW

SEQ ID NO: 2337 - protein, 23 aa, synthetic construct
  VARIANT 9..11: note = Any amino acid
CAKHMSMQXXXRADLVGDAFDVW

SEQ ID NO: 2338 - protein, 167 aa, synthetic construct
QVQLVESGGGVVQPGRSLRLSCAASGFSFSEYGIHWVRQAPGKGLEWVAVISYEGSNEYYADSVKGRFTISRDNSKNTLYLQMNSLRAEDTAVYYCARANQHFGPVAGGATPSEEPGSQLTRAELGWDAPPGQESLADELLQLGTEHGYHYYGMDVWGQGTLVTVSS

SEQ ID NO: 2339 - protein, 137 aa, synthetic construct
QVQLVQSGAEVKKPGSSVKVSCKASGGSFSNYGISWVRQAPGQGLEWMGGIIPLIGTANYAQKFQGRVTITADESTSTAYMELSSLRSEDTAVYYCARDMYYDFTLGPQSIGPLGEVVPADDAFDIWGQGTLVTVSS

SEQ ID NO: 2340 - protein, 149 aa, synthetic construct
QVQLVQSGAEVKKPGSSVNVSCKASGGTFSDYAFSWVRQAPGQGLEWMGAIIPFFGTVNYAQKFQGRVTITADESTSTAYMELSSLRSEDTAVYYCARDMYYDFATGTGGPEDDLYPQGELNDGYRIEVVPADDAFDIWGQGTLVTVSS

SEQ ID NO: 2341 - protein, 143 aa, synthetic construct
QVQLVQSGAEVKKPGSSVKVSCKASVDTFSRYSISWVRQAPGQGLEWMGGIIPVFDTTNYAQKFQGRVTITADESTSTAYMELSSLRSEDTAVYYCARDMYYDFGVILGGTAVGTNNGSANEVVPADDAFDIWGQGTLVTVSS

SEQ ID NO: 2342 - protein, 140 aa, synthetic construct
QVQLVQSGAEVKKPGSSVKVSCKASGGTFSSHAINWVRQAPGQGLEWMGRIIPIVGTTTYAQKFQGRVTITADESTSTAYMELSSLRSEDTAVYYCARDMYYDFDYFGLTLTGDRNDDEVVPADDAFDIWGQGTLVTVSS

SEQ ID NO: 2343 - protein, 139 aa, synthetic construct
QVQLVQSGAEVKKPGSSVKVSCKASGGTFSSYAISWVRQAPGQGLEWMGGIIPIFGTANYAQKFQGRVTITADESTSTAYMELSSLRSEDTAVYYCARDMYYDFWLGDQSTGSLIGAEVVPADDAFDIWGQGTLVTVSS

SEQ ID NO: 2344 - protein, 147 aa, synthetic construct
QVQLVQSGAEVKKPGSSVKVSCKASGGTFTDYAISWVRQAPGQGLEWMGGIIPFFGSPNYAQKFQGRVTITADESTSTAYMELSSLRSEDTAVYYCARDMYYDFAAGLEGTITEVFDEEGHQGGTEVVPADDAFDIWGQGTLVTVSS

SEQ ID NO: 2345 - protein, 139 aa, synthetic construct
QVQLVESGGGVVQPGRSLRLSCAASGFTFDNYGMHWVRQAPGKGLEWVAVISYEGSNKKYADSVKGRFTISRDNSKNTLYLQMNSLRAEDTAVYYCARDMYYDFGSIYGEDVVGELPEVVPADDAFDIWGQGTLVTVSS

SEQ ID NO: 2346 - protein, 153 aa, synthetic construct
QVQLVESGGGVVQPGRSLRLSCAASGFTFSHYAMHWVRQAPGKGLEWVADISHEGSNKYYADSVKGRFTISRDNSKNTLYLQMNSLRAEDTAVYYCARDGRGSLPRPKGGPTSGGGFSTNIGYGFVVQSYDSSEDSGGAFDIWGQGTLVTVSS

SEQ ID NO: 2347 - protein, 137 aa, synthetic construct
QVQLVQSGAEVKKPGSSVKVSCKASGGTFRSYAISWVRQAPGQGLEWMGGIIPISGTTNYAQKFQGRVTITADESTSTAYMELSSLRSEDTAVYYCARANQHFTRIFGNYQIYFGHFGYHYYGMDVWGQGTLVTVSS

SEQ ID NO: 2348 - protein, 142 aa, synthetic construct
QVQLVQSGAEVKKPGSSVKVSCKASGGTFSSYALSWVRKAPGQGLEWMGGTIPIFGTVNYAQKFQGRVTITADESTSTAYMELSSLRSEDTAVYYCARANQHFTRVIGQPSPAVPSRGYIYHGYHYYGMDVWGQGTLVTVSS

SEQ ID NO: 2349 - protein, 155 aa, synthetic construct
QVQLVESGGGVVQPGRSLRLSCAASGFDFSGYGMHWVRQAPGKGLEWVAVISYEGSNKFYADSVKGRFTISRDNSKNTLYLQMNSLRAEDTAVYYCARDLRELECEEWTIEVHGQEFAVHQDRGGVFSRGPCVDPRGVAGSFDVWGQGTLVTVSS

SEQ ID NO: 2350 - protein, 141 aa, synthetic construct
QVQLVQSGAEVKKPGSSVKVSCKASGGTFSSYAMSWVRQAPGQGLEWMGGIIPLFGTTDYAQKFQGRVTITADESTSTAYMELSSLRSEDTAVYYCARANQHFVKIQGAPVSTPVPGFGTTGYHYYGMDVWGQGTLVTVSS

SEQ ID NO: 2351 - protein, 143 aa, synthetic construct
QVQLVESGGGVVQPGRSLRLSCAASGFTFSKHGMHWVRQAPGKGLEWVAFISYEGSEKYYADSVKGRFTISRDNSKNTLYLQMNSLRAEDTAVYYCARDMYYDFHYSTVGATYYYYLGSETEVVPADDAFDIWGQGTLVTVSS

SEQ ID NO: 2352 - protein, 141 aa, synthetic construct
QVQLVQSGAEVKKPGSSVKVSCKASGGTFSTYAIDWVRQAPGQGLEWMGGIIPLFGSPNYAQKFQGRVTITADESTSTAYMELSSLRSEDTAVYYCARANQHFFLYEGTSSSWLHVGHARYGYHYYGMDVWGQGTLVTVSS

SEQ ID NO: 2353 - protein, 142 aa, synthetic construct
QVQLVQSGAEVKKPGSSVKVSCKASGGSFRSYGISWVRQAPGQGLEWMGRIIPLFGTPDYAQKFQGRVTITADESTSTAYMELSSLRSEDTAVYYCARDMYYDFEDVDEGSLYLDMGRTFEVVPADDAFDIWGQGTLVTVSS

SEQ ID NO: 2354 - protein, 156 aa, synthetic construct
QVQLVESGGGVVQPGRSLRLSCAASGFAFSSYAMHWVRQAPGKGLEWVAVISYEGSNEYYADSVKGRFTISRDNSKNTLYLQMNSLRAEDTAVYYCARDLRELECEEWTVLQYGKFHMRWAESGEGSLSRGPCVDPRGVAGSFDVWGQGTLVTVSS

SEQ ID NO: 2355 - protein, 144 aa, synthetic construct
QVQLVESGGGVVQPGRSLRLSCAASGFTFRSYDMHWVRQAPGKGLEWVAVISYEGSEKYYADSVKGRFTISRDNSKNTLYLQMNSLRAEDTAVYYCAKHMSMQASTEGDFGLEEVTGEGVDDRADLVGDAFDVWGQGTLVTVSS

SEQ ID NO: 2356 - protein, 138 aa, synthetic construct
QVQLVQSGAEVKKPGSSVKVSCKASGGTFKNYAINWVRQAPGQGLEWMGAIIPKFGAANYAQKFQGRVTITADESTSTAYMELSSLRSEDTAVYYCARANQHFSAVRGLAFGYGYRIGGYHYYGMDVWGQGTLVTVSS

SEQ ID NO: 2357 - protein, 139 aa, synthetic construct
QVQLVQSGAEVKKPGSSVKVSCKASGGTFSNHAIIWVRQAPGQGLEWMGGIIPIFGTPSYAQKFQGRVTITADESTSTAYMELSSLRSEDTAVYYCARDMYYDFDVISAGVVGAGNPEVVPADDAFDIWGQGTLVTVSS

SEQ ID NO: 2358 - protein, 126 aa, synthetic construct
EVQLLESGGGLVQPGGSLRLSCAASGFSFSTHAMSWVRQAPGKGLEWVSTIGGSGGSTYYADSVKGRFTISRDNSKNTLYLQMNSLRAEDTAVYYCARAHGDSSSWYFSYYYMDVWGQGTLVTVSS

SEQ ID NO: 2359 - protein, 117 aa, synthetic construct
EVQLVESGGGLVQPGGSLRLSCAASGGIFRFNAMGWFRQAPGKERELVAGISGSGGDTYYADSVKGRFTISADNSKNTAYLQMNSLKPEDTAVYYCAAFRGIMRPDWGQGTLVTVSS

SEQ ID NO: 2360 - protein, 123 aa, synthetic construct
EVQLVESGGGLVQPGGSLRLSCAASGPTFDTYVMGWFRQAPGKEREFVAAISMSGDDTAYADSVKGRFTISADNSKNTAYLQMNSLKPEDTAVYYCATDLRGRGDVSEYEYDWGQGTLVTVSS

SEQ ID NO: 2361 - protein, 110 aa, synthetic construct
QSVLTQPPSVSAAPGQKVTISCSGSTSNIGKNYVSWYQQLPGTAPKLLIYDDDERPSGIPDRFSGSMSGTSATLGITGLQTGDEADYYCEAWDADLSGAVFGGGTKLTVL

SEQ ID NO: 2362 - protein, 217 aa, synthetic construct
QSVLTQPPSVSAAPGQKVTISCSGSSSNIGNNFVSWYQQLPGTAPKLLIYDNIQRPSGIPDRFSGSKSGTSATLGITGLQTGDEADYYCGTWDTSLSAVVFGGGTKLTVLRTVAAPSVFIFPPSDEQLKSGTASVVCLLNNFYPREAKVQWKVDNALQSGNSQESVTEQDSKDSTYSLSSTLTLSKADYEKHKVYACEVTHQGLSSPVTKSFNRGEC

SEQ ID NO: 2363 - protein, 110 aa, synthetic construct
QSVLTQPPSVSAAPGQKVTISCSGSISNIGKNYVSWYQQLPGTAPKLLIYDDHKRPSGIPDRFSGSKSGTSATLGITGLQTGDEADYYCATWDRGLSAAVFGGGTKLTVL

SEQ ID NO: 2364 - protein, 111 aa, synthetic construct
QSVLTQPPSVSAAPGQKVTISCSGSSSNIGDNDVSWYQQLPGTAPKLLIYDDDKRPSGIPDRFSGSKSGTSATLGITGLQTGDEADYYCASWDTSLSGGYVFGGGTKLTVL

SEQ ID NO: 2365 - protein, 110 aa, synthetic construct
QSALTQPASVSGSPGQSITISCTGTSSDVGGYDYVTWYQQHPGKAPKLMIYDVDTRPSGVSNRFSGSKSGNTASLTISGLQAEDEADYYCSSYTTSTSYVFGGGTKLTVL

SEQ ID NO: 2366 - protein, 110 aa, synthetic construct
QSVLTQPPSVSAAPGQKVTISCSGSTSNIGNNYVSWYQQLPGTAPKLLIYENDERPSGIPDRFSGSKSGTSATLGITGLQTGDEADYYCATWDTRLSAVVFGGGTKLTVL

SEQ ID NO: 2367 - protein, 110 aa, synthetic construct
QSVLTQPPSVSAAPGQKVTISCSGSSSNIGKNYVSWYQQLPGTAPKLLIYDNNQRPSGIPDRFSGSKSGTSATLGITGLQTGDEADYYCGTWDTSLTSVVFGGGTKLTVL

SEQ ID NO: 2368 - protein, 110 aa, synthetic construct
QSALTQPASVSGSPGQSITISCTGTSNDVGAYNFVSWYQQHPGKAPKLMIYDISNRPSGVSNRFSGSKSGNTASLTISGLQAEDEADYYCSSYTRSNTRVFGGGTKLTVL

SEQ ID NO: 2369 - protein, 111 aa, synthetic construct
QSVLTQPPSVSAAPGQKVTISCSGTSSNIENNYVSWYQQLPGTAPKLLIYDNVKRPSGIPDRFSGSKSGTSATLGITGLQTGDEADYYCGTWDNTVSAPWVFGGGTKLTVL

SEQ ID NO: 2370 - protein, 111 aa, synthetic construct
QSALTQPASVSGSPGQSITISCTGTSSDIGGYEFVSWYQQHPGKAPKLMIYGVSRRPSGVSNRFSGSKSGNTASLTISGLQAEDEADYYCGSYTSSSTPYVFGGGTKLTVL

SEQ ID NO: 2371 - protein, 111 aa, synthetic construct
QSALTQPASVSGSPGQSITISCTGTSSDIGGYNFVSWYQQHPGKAPKLMIYDVSNRPQGVSNRFSGSKSGNTASLTISGLQAEDEADYYCSSYTSSNTYVVFGGGTKLTVL

SEQ ID NO: 2372 - protein, 108 aa, synthetic construct
EIVMTQSPATLSVSPGERATLSCRASQGVGSNLAWYQQKPGQAPRLLIYRTSIRATGIPARFSGSGSGTEFTLTISSLQSEDFAVYYCQQYYSWPPLTFGGGTKVEIK

SEQ ID NO: 2373 - protein, 110 aa, synthetic construct
QSVLTQPPSVSAAPGQKVTISCSGSSSNIEDNYVSWYQQLPGTAPKLLIYDNFKRPSGIPDRFSGSKSGTSATLGITGLQTGDEADYYCGTWDTSLSAALFGGGTKLTVL

SEQ ID NO: 2374 - protein, 111 aa, synthetic construct
QSALTQPASVSGSPGQSITISCTGTSSGVGGYDYVSWYQQHPGKAPKLMIYDDNNRPSGVSNRFSGSKSGNTASLTISGLQAEDEADYYCSSYTGSSTLYVFGGGTKLTVL

SEQ ID NO: 2375 - protein, 110 aa, synthetic construct
QSVLTQPPSVSAAPGQKVTISCSGSGSNIGSNYVSWYQQLPGTAPKLLIYDNIRRPSGIPDRFSGSKSGTSATLGITGLQTGDEADYYCAAWDTRLSAGVFGGGTKLTVL

SEQ ID NO: 2376 - protein, 107 aa, synthetic construct
DIQMTQSPSSLSASVGDRVTITCRASQGISTYLNWYQQKPGKAPKLLIYATSSLQSGVPSRFSGSGSGTDFTLTISSLQPEDFATYYCQQSYSTPWTFGGGTKVEIK

SEQ ID NO: 2377 - protein, 111 aa, synthetic construct
QSALTQPASVSGSPGQSITISCTGTSSDVGGYRYVSWYQQHPGKAPKLMIYNVNYRPSGVSNRFSGSKSGNTASLTISGLQAEDEADYYCSSYRSSSTLGVFGGGTKLTVL

SEQ ID NO: 2378 - protein, 110 aa, synthetic construct
QSVLTQPPSVSAAPGQKVTISCSGSSSNIGDNFVSWYQQLPGTAPKLLIYDDDERPSGIPDRFSGSKSGTSATLGITGLQTGDEADYYCGAWDRSLSAVVFGGGTKLTVL

SEQ ID NO: 2379 - protein, 110 aa, synthetic construct
QSVLTQPPSVSAAPGQKVTISCSGSTSNIGINYVSWYQQLPGTAPKLLIYENRKRPSGIPDRFSGSKSGTSATLGITGLQTGDEADYYCATWDASLKNLVFGGGTKLTVL

SEQ ID NO: 2380 - protein, 112 aa, synthetic construct
QSVLTQPPSVSAAPGQKVTISCSGSTSNIGNNFVSWYQQLPGTAPKLLIYDNEKRPSGIPDRFSGSKSGTSATLGITGLQTGDEADYYCGTWDERQTDESYVFGGGTKLTVL

SEQ ID NO: 2381 - protein, 107 aa, synthetic construct
DIQMTQSPSSLSASVGDRVTITCRASQSISDYVNWYQQKPGKAPKLLIYGASILQTGVPSRFSGSGSGTDFTLTISSLQPEDFATYYCQQSFTTPWTFGGGTKVEIK

SEQ ID NO: 2382 - protein, 63 aa, synthetic construct
CARANQHFGPVAGGATPSEEPGSQLTRAELGWDAPPGQESLADELLQLGTEHGYHHYYGMDVW

SEQ ID NO: 2383 - protein, 32 aa, synthetic construct
CARDMYYDFTLGPQSIGPLGEVVPADDAFDIW

SEQ ID NO: 2384 - protein, 44 aa, synthetic construct
CARDMYYDFATGTGGPEDDLYPQGELNDGYRIEVVPADDAFDIW

SEQ ID NO: 2385 - protein, 38 aa, synthetic construct
CARDMYYDFGVILGGTAVGTNNGSANEVVPADDAFDIW

SEQ ID NO: 2386 - protein, 35 aa, synthetic construct
CARDMYYDFDYFGLTLTGDRNDDEVVPADDAFDIW

SEQ ID NO: 2387 - protein, 34 aa, synthetic construct
CARDMYYDFWLGDQSTGSLIGAEVVPADDAFDIW

SEQ ID NO: 2388 - protein, 42 aa, synthetic construct
CARDMYYDFAAGLEGTITEVFDEEGHQGGTEVVPADDAFDIW

SEQ ID NO: 2389 - protein, 34 aa, synthetic construct
CARDMYYDFGSIYGEDVVGELPEVVPADDAFDIW

SEQ ID NO: 2390 - protein, 48 aa, synthetic construct
CARDGRGSLPRPKGGPTSGGGFSTNIGYGFVVQSYDSSEDSGGAFDIW

SEQ ID NO: 2391 - protein, 32 aa, synthetic construct
CARANQHFTRIFGNYQIYFGHFGYHYYGMDVW

SEQ ID NO: 2392 - protein, 37 aa, synthetic construct
CARANQHFTRVIGQPSPAVPSRGYIYHGYHYYGMDVW

SEQ ID NO: 2393 - protein, 51 aa, synthetic construct
CARDLRELECEEWTIEVHGQEFAVHQDRGGVFSRGPCVDPRGVAGGSFDVW

SEQ ID NO: 2394 - protein, 36 aa, synthetic construct
CARANQHFVKIQGAPVSTPVPGFGTTGYHYYGMDVW

SEQ ID NO: 2395 - protein, 38 aa, synthetic construct
CARDMYYDFHYSTVGATYYYYLGSETEVVPADDAFDIW

SEQ ID NO: 2396 - protein, 37 aa, synthetic construct
CARANQHFFLYEGTSSSWLHVGHARYGYHYYYGMDVW

SEQ ID NO: 2397 - protein, 37 aa, synthetic construct
CARDMYYDFEDVDEGSLYLDMGRTFEVVPADDAFDIW

SEQ ID NO: 2398 - protein, 51 aa, synthetic construct
CARDLRELECEEWTVLQYGKFHMRWAESGEGSLSRGPCVDPRGVAGSFDVW

SEQ ID NO: 2399 - protein, 39 aa, synthetic construct
CAKHMSMQASTEGDFGLEEVTGEGVDDRADLVGDAFDVM

SEQ ID NO: 2400 - protein, 33 aa, synthetic construct
CARANQHFSAVRGLAFGYGYRIGGYHYYGMDVW

SEQ ID NO: 2401 - protein, 34 aa, synthetic construct
CARDMYYDFDVISAGVVGAGNPEVVPADDAFDIW

SEQ ID NO: 2402 - protein, 34 aa, synthetic construct; identical to SEQ ID NO: 2401

SEQ ID NO: 2403 - protein, 120 aa, synthetic construct
EVQLVESGGGLVQAGGSLRLSCAASGSIFRINAMGWFRQAPGKEREGVAAINNFGTTKYADSVKGRFTISADNAKNTVYLQMNSLKPEDTAVYYCAAVRWGPRNDDRYDWGQGTQVTVSS

SEQ ID NO: 2404 - protein, 123 aa, synthetic construct
EVQLVESGGGLVQAGGSLRLSCAASGSFFSINAMGWFRQAPGKEREFVAGITRSGVSTSYADSVKGRFTISADNAKNTVYLQMNSLKPEDTAVYYCAAHRIVVGGTSVGDWRWGQGTQVTVSS

SEQ ID NO: 2405 - protein, 120 aa, synthetic construct
EVQLVESGGGLVQAGGSLRLSCAASGSIFHINAMGWFRQAPGKEREGVAAINNFGTTKYADSVKGRFTISANNAKNTVYLQMNSLKPEDTAVYYCAAVRWGPRNDDRYDWGQGTLVTVSS

SEQ ID NO: 2406 - protein, 108 aa, synthetic construct
DIQMTQSPSSLSASVGDRVTITCRASQSISSDLNWYQQKPGKAPKLLIYFASGLQSGVPSRFSGSGSGTDFTLTISSLQPEDFATYYCQQSYSSPLTFGGGTKVEIKR

SEQ ID NO: 2407 - protein, 108 aa, synthetic construct
DIQMTQSPSSLSASVGDRVTITCRTSQSISNYLNWYQQKPGKAPKLLIYATSSLESGVPSRFSGSGSGTDFTLTISSLQPEDFATYYCQQSYSTLLTFGGGTKVEIKR

SEQ ID NO: 2408 - protein, 108 aa, synthetic construct
DIQMTQSPSSLSASVGDRVTITCRASQSISRYLHWYQQKPGKAPKLLIYGASRLESGVPSRFSGSGSGTDFTLTISSLQPEDFATYYCRQSYSTPWTFGGGTKVEIKR

SEQ ID NO: 2409 - protein, 8 aa, synthetic construct
GGTFSSYA

SEQ ID NO: 2410 - protein, 8 aa, synthetic construct
IIPIFGTA

SEQ ID NO: 2411 - protein, 16 aa, synthetic construct
CARNNNNNNNNNFDYW

SEQ ID NO: 2412 - protein, 8 aa, synthetic construct
GFTFSSYA

SEQ ID NO: 2413 - protein, 8 aa, synthetic construct
ISGSGGST

SEQ ID NO: 2414 - protein, 16 aa, synthetic construct
CAKNNNNNNNNNFDYW

SEQ ID NO: 2415 - protein, 6 aa, synthetic construct
QSISSY

SEQ ID NO: 2416 - skipped

SEQ ID NO: 2417 - protein, 11 aa, synthetic construct [sequence omitted]

SEQ ID NO: 2418 - protein, 7 aa, synthetic construct
QSVSSSY

SEQ ID NO: 2419 - skipped

SEQ ID NO: 2420 - protein, 11 aa, synthetic construct [sequence omitted]

SEQ ID NO: 2421 - protein, 11 aa, synthetic construct
  VARIANT 6: note = Ser, Asp, or Asn
  VARIANT 8: note = Tyr, Ala, Gly, or Trp
  VARIANT 10: note = Ser, His, or Gly
GFTFSXYXMXW

SEQ ID NO: 2422 - protein, 16 aa, synthetic construct
  VARIANT 3: note = Ser or Ala
  VARIANT 4: note = Tyr or Val
  VARIANT 7: note = Tyr or Pro
  VARIANT 8: note = Asn, Ser, or Asp
  VARIANT 10: note = Gly or Ser
  VARIANT 11: note = Ile, Asn, or Glu
  VARIANT 12: note = Thr or Lys
  VARIANT 15: note = Pro or Ala
WVXXISXXGXXXYYXD

SEQ ID NO: 2423 - protein, 25 aa, synthetic construct
  VARIANT 4: note = Gly or Asp
  VARIANT 5: note = Arg or Glu
  VARIANT 6: note = Gly, Leu, or Asp
  VARIANT 7: note = Tyr, Asn, or His
  VARIANT 8: note = Tyr or Arg
  VARIANT 9: note = Tyr or Gly
  VARIANT 10: note = Ser, Asp, or Ile
  VARIANT 11: note = Gly, Ser, Arg, or Phe
  VARIANT 12: note = Ser, Trp, Tyr, Thr, or Leu
  VARIANT 13: note = Arg, Gly, Thr, or Tyr
  VARIANT 14: note = Tyr, His, Gln, or Phe
  VARIANT 15: note = Arg, Tyr, Asp, or Asn
  VARIANT 16: note = Gly, His, Tyr, or Phe
  VARIANT 17: note = Tyr, Gly, or His
  VARIANT 18: note = Lys, Tyr, or Phe
  VARIANT 19: note = Tyr, Gly, or His
  VARIANT 20: note = Arg, Tyr, Gly, or Phe
  VARIANT 21: note = Gly or Pro
CARXXXXXXXXXXXXXXXXXXMDVW

SEQ ID NO: 2424 - protein, 23 aa, synthetic construct
  VARIANT 5: note = Pro, Lys, Ile, or Arg
  VARIANT 6: note = Val, Ser, Asp, or Arg
  VARIANT 7: note = Val, His, Tyr, or Gly
  VARIANT 8: note = Leu, Tyr, Arg, or Trp
  VARIANT 9: note = Val, Asp, Tyr, or Phe
  VARIANT 10: note = Gly, Ile, Ser, or Asp
  VARIANT 11: note = Val, Leu, Arg, or Phe
  VARIANT 12: note = Trp, Thr, Tyr, or Ser
  VARIANT 13: note = Thr, Gly, or Arg
  VARIANT 14: note = Gln, His, Tyr, or Asn
  VARIANT 15: note = Arg, Asp, Asn, or Tyr
  VARIANT 16: note = Tyr, Gly, or His
  VARIANT 17: note = Tyr or Ala
  VARIANT 18: note = Tyr or Arg
  VARIANT 19: note = Gly or Thr
  VARIANT 20: note = Met, Leu, or Phe
  VARIANT 22: note = Val or Tyr
CAREXXXXXXXXXXXXXXXXDXW

SEQ ID NO: 2425 - protein, 19 aa, synthetic construct
  VARIANT 4: note = Gly or Asp
  VARIANT 5: note = Pro, Lys, Asp, Thr, or Arg
  VARIANT 6: note = Asp, Ser, Gln, or Arg
  VARIANT 7: note = Gly, Arg, Asp, or Ser
  VARIANT 8: note = Tyr, Arg, Trp, or Asn
  VARIANT 9: note = Thr, Tyr, Gly, or Leu
  VARIANT 10: note = Ser, Gly, Asp, Ile, or Pro
  VARIANT 11: note = Phe, Tyr, Arg, Trp, or Leu
  VARIANT 12: note = Tyr, Leu, His, Thr, or Trp
  VARIANT 13: note = Gly, Arg, or Thr
  VARIANT 14: note = Tyr, His, Phe, or Gln
  VARIANT 15: note = Pro, Tyr, Asn, or Gly
CARXXXXXXXXXXXXFDYW

SEQ ID NO: 2426 - protein, 14 aa, synthetic construct
  VARIANT 4: note = Gly, Asp, His, or Ile
  VARIANT 5: note = Arg, Leu, or Asp
  VARIANT 6: note = Arg, Asp, Thr, or His
  VARIANT 7: note = Gly, Asp, Tyr, or Asn
  VARIANT 8: note = Tyr, Trp, Gly, or Asn
  VARIANT 9: note = Phe, Tyr, or Asp
  VARIANT 10: note = Gly, Pro, or Ala
CARXXXXXXXFDYW

SEQ ID NO: 2427 - protein, 11 aa, synthetic construct
  VARIANT 6: note = Ser, Asp, or Asn
  VARIANT 8: note = Ala, Tyr, or Trp
  VARIANT 10: note = Ser, His, or Asn
GGTFSXYXMXW

SEQ ID NO: 2428 - protein, 16 aa, synthetic construct
  VARIANT 4: note = Val, Arg, or Thr
  VARIANT 6: note = Asn or Arg
  VARIANT 8: note = Gly, Tyr, or Asn
  VARIANT 9: note = Asn or Asp
  VARIANT 11: note = Glu or Tyr
  VARIANT 13: note = Lys, Tyr, or His
  VARIANT 15: note = Ala or Asn
  VARIANT 16: note = Asp or Gln
WIGXIXPXXGXTXYXX

SEQ ID NO: 2429 - protein, 22 aa, synthetic construct
  VARIANT 4: note = Pro, Gly, or His
  VARIANT 5: note = Ser, Phe, or Gly
  VARIANT 6: note = Glu, Arg, or Ala
  VARIANT 7: note = Arg, Tyr, or Pro
  VARIANT 8: note = Ser, Tyr, or Met
  VARIANT 9: note = His, Asp, Ser, or Tyr
  VARIANT 10: note = Tyr, Gly, Thr, or Val
  VARIANT 11: note = Tyr, Ser, or Glu
  VARIANT 12: note = Ala, Tyr, or Ile
  VARIANT 13: note = Thr, Phe, or Tyr
  VARIANT 14: note = Ser or Tyr
  VARIANT 15: note = Ala, Phe, or His
  VARIANT 16: note = Pro, Tyr, or Gly
  VARIANT 17: note = Tyr, Gly, or Phe
  VARIANT 18: note = Gln, Ala, or Tyr
  VARIANT 19: note = Phe or Met
  VARIANT 20: note = Asp or Ala
CARXXXXXXXXXXXXXXXXXYW

SEQ ID NO: 2430 - protein, 18 aa, synthetic construct
  VARIANT 4: note = Asp, Ser, Leu, or His
  VARIANT 5: note = Ser, Phe, Glu, Pro, or Thr
  VARIANT 6: note = Ser, Gly, Phe, or Ile
  VARIANT 7: note = Asp, Ser, Gly, Tyr, or Arg
  VARIANT 8: note = Tyr, Asn, Ser, or Phe
  VARIANT 9: note = Tyr, Asp, Gly, or Thr
  VARIANT 10: note = Gly, Val, Asn, Asp, or Tyr
  VARIANT 11: note = Tyr, Phe, Ser, or Gly
  VARIANT 12: note = Ala, Tyr, Asn, Gln, or Ser
  VARIANT 13: note = Gly, Tyr, Thr, or Phe
  VARIANT 14: note = Ala, Trp, Gly, or Tyr
  VARIANT 16: note = Ala or Asp
CARXXXXXXXXXXXFXYW

SEQ ID NO: 2431 - protein, 17 aa, synthetic construct
  VARIANT 4: note = Ser, His, Asp, or Leu
  VARIANT 5: note = Tyr, Leu, Gly, or Glu
  VARIANT 6: note = Tyr, Gly, Ser, or Leu
  VARIANT 7: note = Asp, Ser, Lys, Pro, or Trp
  VARIANT 8: note = Ser, Tyr, Asn, or His
  VARIANT 9: note = Phe, Asp, Tyr, Thr, or Asn
  VARIANT 10: note = Tyr, Val, Gly, Asn, or Asp
  VARIANT 11: note = Tyr, Thr, Phe, Leu, or Gly
  VARIANT 12: note = Tyr, Ala, Asn, Ser, or His
  VARIANT 13: note = Ala or Tyr
CARXXXXXXXXXXMDYW

SEQ ID NO: 2432 - protein, 14 aa, synthetic construct
  VARIANT 4: note = Arg, Gly, Asp, or Phe
  VARIANT 5: note = Gly, Asp, Arg, or Tyr
  VARIANT 6: note = Gly, Tyr, Ser, His, or Asn
  VARIANT 7: note = Gly, Tyr, Ser, Leu, or Trp
  VARIANT 8: note = Arg, Gly, Phe, Ala, or Tyr
  VARIANT 9: note = Arg, Ala, Phe, Tyr, or Asp
  VARIANT 10: note = Tyr, Ser, Trp, Lys, or Ala
  VARIANT 11: note = Phe or Leu
  VARIANT 12: note = Asp, Ala, or Val
CARXXXXXXXXXYW

SEQ ID NO: 2433 - protein, 18 aa, synthetic construct
  VARIANT 9: note = His or Asn
  VARIANT 11: note = Asn or Asp
  VARIANT 13: note = Asn or Lys
  VARIANT 17: note = Ala, His, or Glu
CRSSQSLVXSXGXTYLXW

SEQ ID NO: 2434 - protein, 9 aa, synthetic construct
  VARIANT 3: note = Ala or Val
  VARIANT 7: note = Ala or Phe
YKXSNRXSG

SEQ ID NO: 2435 - protein, 11 aa, synthetic construct
  VARIANT 2: note = Gln or Phe
  VARIANT 4: note = Gly or Ser
  VARIANT 5: note = Ser or Tyr
  VARIANT 6: note = His, Ser, or Glu
  VARIANT 7: note = Tyr, Val, or Thr
  VARIANT 9: note = Leu or Phe
CXQXXXXPXTF

SEQ ID NO: 2436 - protein, 15 aa, synthetic construct
  VARIANT 11: note = Asn or His
CSGSSSNIGSXYVSW

SEQ ID NO: 2437 - protein, 9 aa, synthetic construct
YRNNQRPSG

SEQ ID NO: 2438 - protein, 13 aa, synthetic construct
  VARIANT 2: note = Ala or Gly
  VARIANT 3: note = Thr, Ser, or Val
  VARIANT 4: note = Trp, Thr, or Arg
  VARIANT 6: note = Ser or Gly
  VARIANT 7: note = Thr, Arg, Ser, or Gln
  VARIANT 8: note = Ser, Leu, or Trp
  VARIANT 9: note = Arg or Ser
  VARIANT 10: note = Ser, Ala, or Gln
CXXXDXXXXXVVF

1-51. (canceled)

52. An antibody or antibody fragment that binds to TIGIT, wherein the antibody or antibody fragment comprises a heavy chain variable region (VH) and a light chain variable region (VL), wherein:
a. the VH comprises an amino acid sequence at least 95%, 96%, 97%, 98%, or 99% identical to the amino acid sequence set forth in SEQ ID NO: 84, and wherein the VL comprises an amino acid sequence at least 95%, 96%, 97%, 98%, or 99% identical to the amino acid sequence set forth in SEQ ID NO: 101;
b. the VH comprises an amino acid sequence at least 95%, 96%, 97%, 98%, or 99% identical to the amino acid sequence set forth in SEQ ID NO: 85, and wherein the VL comprises an amino acid sequence at least 95%, 96%, 97%, 98%, or 99% identical to the amino acid sequence set forth in SEQ ID NO: 102;
c. the VH comprises an amino acid sequence at least 95%, 96%, 97%, 98%, or 99% identical to the amino acid sequence set forth in SEQ ID NO: 86, and wherein the VL comprises an amino acid sequence at least 95%, 96%, 97%, 98%, or 99% identical to the amino acid sequence set forth in SEQ ID NO: 103;
d. the VH comprises an amino acid sequence at least 95%, 96%, 97%, 98%, or 99% identical to the amino acid sequence set forth in SEQ ID NO: 87, and wherein the VL comprises an amino acid sequence at least 95%, 96%, 97%, 98%, or 99% identical to the amino acid sequence set forth in SEQ ID NO: 104;
e. the VH comprises an amino acid sequence at least 95%, 96%, 97%, 98%, or 99% identical to the amino acid sequence set forth in SEQ ID NO: 88, and wherein the VL comprises an amino acid sequence at least 95%, 96%, 97%, 98%, or 99% identical to the amino acid sequence set forth in SEQ ID NO: 105;
f. the VH comprises an amino acid sequence at least 95%, 96%, 97%, 98%, or 99% identical to the amino acid sequence set forth in SEQ ID NO: 89, and wherein the VL comprises an amino acid sequence at least 95%, 96%, 97%, 98%, or 99% identical to the amino acid sequence set forth in SEQ ID NO: 106;
g. the VH comprises an amino acid sequence at least 95%, 96%, 97%, 98%, or 99% identical to the amino acid sequence set forth in SEQ ID NO: 90, and wherein the VL comprises an amino acid sequence at least 95%, 96%, 97%, 98%, or 99% identical to the amino acid sequence set forth in SEQ ID NO: 107;
h. the VH comprises an amino acid sequence at least 95%, 96%, 97%, 98%, or 99% identical to the amino acid sequence set forth in SEQ ID NO: 91, and wherein the VL comprises an amino acid sequence at least 95%, 96%, 97%, 98%, or 99% identical to the amino acid sequence set forth in SEQ ID NO: 108;
i. the VH comprises an amino acid sequence at least 95%, 96%, 97%, 98%, or 99% identical to the amino acid sequence set forth in SEQ ID NO: 92, and wherein the VL comprises an amino acid sequence at least 95%, 96%, 97%, 98%, or 99% identical to the amino acid sequence set forth in SEQ ID NO: 109;
j. the VH comprises an amino acid sequence at least 95%, 96%, 97%, 98%, or 99% identical to the amino acid sequence set forth in SEQ ID NO: 93, and wherein the VL comprises an amino acid sequence at least 95%, 96%, 97%, 98%, or 99% identical to the amino acid sequence set forth in SEQ ID NO: 110;
k. the VH comprises an amino acid sequence at least 95%, 96%, 97%, 98%, or 99% identical to the amino acid sequence set forth in SEQ ID NO: 94, and wherein the VL comprises an amino acid sequence at least 95%, 96%, 97%, 98%, or 99% identical to the amino acid sequence set forth in SEQ ID NO: 111;
l. the VH comprises an amino acid sequence at least 95%, 96%, 97%, 98%, or 99% identical to the amino acid sequence set forth in SEQ ID NO: 95, and wherein the VL comprises an amino acid sequence at least 95%, 96%, 97%, 98%, or 99% identical to the amino acid sequence set forth in SEQ ID NO: 112;
m. the VH comprises an amino acid sequence at least 95%, 96%, 97%, 98%, or 99% identical to the amino acid sequence set forth in SEQ ID NO: 96, and wherein the VL comprises an amino acid sequence at least 95%, 96%, 97%, 98%, or 99% identical to the amino acid sequence set forth in SEQ ID NO: 113;
n. the VH comprises an amino acid sequence at least 95%, 96%, 97%, 98%, or 99% identical to the amino acid sequence set forth in SEQ ID NO: 97, and wherein the VL comprises an amino acid sequence at least 95%, 96%, 97%, 98%, or 99% identical to the amino acid sequence set forth in SEQ ID NO: 114;
o. VH comprises an amino acid sequence at least 95%, 96%, 97%, 98%, or 99% identical to the amino acid sequence set forth in SEQ ID NO: 98, and wherein the VL comprises an amino acid sequence at least 95%, 96%, 97%, 98%, or 99% identical to the amino acid sequence set forth in SEQ ID NO: 115;
p. VH comprises an amino acid sequence at least 95%, 96%, 97%, 98%, or 99% identical to the amino acid sequence set forth in SEQ ID NO: 99, and wherein the VL comprises an amino acid sequence at least 95%, 96%, 97%, 98%, or 99% identical to the amino acid sequence set forth in SEQ ID NO: 116; or
q. VH comprises an amino acid sequence at least 95%, 96%, 97%, 98%, or 99% identical to the amino acid sequence set forth in SEQ ID NO: 100, and wherein the VL comprises an amino acid sequence at least 95%, 96%, 97%, 98%, or 99% identical to the amino acid sequence set forth in SEQ ID NO: 117.

53. The antibody or antibody fragment of claim 52, wherein:
a. the VH comprises the amino acid sequence set forth in SEQ ID NO: 84, and wherein the VL comprises the amino acid sequence set forth in SEQ ID NO: 101;
b. the VH comprises the amino acid sequence set forth in SEQ ID NO: 85, and wherein the VL comprises the amino acid sequence set forth in SEQ ID NO: 102;
c. the VH comprises the amino acid sequence set forth in SEQ ID NO: 86, and wherein the VL comprises the amino acid sequence set forth in SEQ ID NO: 103;
d. the VH comprises the amino acid sequence set forth in SEQ ID NO: 87, and wherein the VL comprises the amino acid sequence set forth in SEQ ID NO: 104;
e. the VH comprises the amino acid sequence set forth in SEQ ID NO: 88, and wherein the VL comprises the amino acid sequence set forth in SEQ ID NO: 105;
f. the VH comprises the amino acid sequence set forth in SEQ ID NO: 89, and wherein the VL comprises the amino acid sequence set forth in SEQ ID NO: 106;
g. the VH comprises the amino acid sequence set forth in SEQ ID NO: 90, and wherein the VL comprises the amino acid sequence set forth in SEQ ID NO: 107;
h. the VH comprises the amino acid sequence set forth in SEQ ID NO: 91, and wherein the VL comprises the amino acid sequence set forth in SEQ ID NO: 108;
i. the VH comprises the amino acid sequence set forth in SEQ ID NO: 92, and wherein the VL comprises the amino acid sequence set forth in SEQ ID NO: 109;
j. the VH comprises the amino acid sequence set forth in SEQ ID NO: 93, and wherein the VL comprises the amino acid sequence set forth in SEQ ID NO: 110;
k. the VH comprises the amino acid sequence set forth in SEQ ID NO: 94, and wherein the VL comprises the amino acid sequence set forth in SEQ ID NO: 111;
l. the VH comprises the amino acid sequence set forth in SEQ ID NO: 95, and wherein the VL comprises the amino acid sequence set forth in SEQ ID NO: 112;
m. the VH comprises the amino acid sequence set forth in SEQ ID NO: 96, and wherein the VL comprises the amino acid sequence set forth in SEQ ID NO: 113;
n. the VH comprises the amino acid sequence set forth in SEQ ID NO: 97, and wherein the VL comprises the amino acid sequence set forth in SEQ ID NO: 114;
o. the VH comprises the amino acid sequence set forth in SEQ ID NO: 98, and wherein the VL comprises the amino acid sequence set forth in SEQ ID NO: 115;
p. the VH comprises the amino acid sequence set forth in SEQ ID NO: 99, and wherein the VL comprises the amino acid sequence set forth in SEQ ID NO: 116; or
q. the VH comprises the amino acid sequence set forth in SEQ ID NO: 100, and wherein the VL comprises the amino acid sequence set forth in SEQ ID NO: 117.

54. A pharmaceutical composition comprising the antibody or antibody fragment of claim 52.

55. An isolated nucleic acid comprising a sequence that encodes the antibody or antibody fragment of claim 52.

56. An expression vector comprising the nucleic acid of claim 55.

57. An isolated cell comprising the nucleic acid of claim 55.

58. An isolated cell comprising the expression vector of claim 56.

59. A method of treating cancer comprising administering the antibody or antibody fragment of claim 52.

60. A method of treating a viral infection comprising administering the antibody or antibody fragment of claim 52.
